United States Patent Application Publication US 2026/0058010 A1 - sequence listing, part 56

SEQ ID NO: 631 - DNA, 137636 bp, Homo sapiens
  source 1..137636: mol_type = genomic DNA
atctgctgaactactgtatttgtgttttgtctcccaaacttgcagtagactaaagtcgcggagggcaaactctgtgtctactttgcacactcctgaatccagtgactaacgtagtgcctgcctgtggccagcgctcagtgaacatttgttgggtgtatcaattgtgtcaatttgtgcagtgagtactattatcctctttgtgtaagtgaagagtctaaatctcgaaaggttcagcaccttggtgaaactcctgagtggcaggagttgcatccaggtctgtaggaccccagggcaagggttctttgctgcctaagaatttagtctagttggggagacagatgagtgagtagaaattggctgtacaccgaggttagcacaatgataagcacagcacagtagggcaccaaggagggtgccaggctgaaccttggaggggaaaggacaggagaagaccacgagggctttgtggaggaggcgatgacccaaccgcatctacatttgtccaaacacatgaattgatccttgggattctagtggcatctgtaccagtgaaatccaggaagcatccagcctgttaaagtgctttcactttctttgaatgtgacagtggagggtaaagaaatggcagaatgtaccgctgaaacttcacagctgggcgtggtggctcacgcctatgatcccagcactttgggaggccgaggcgggcagatcacctgaggtcaggagttcaagaccagcctggccaacatggtgaaaccccgtctctactaaaaatataaaaactagccaggcatggtgacggacgcctgtaatctcagctacttgggaggctgaggcagaattgcttgaacctaggagatggaggttgcagtgagctgacacagtgctactgtactctagccttggcgacagagtgagactctctcaaaaaaacaaaacgaaacagcaacaacaaaaaacacaacaaagaagtggcagaatgtagtgctgaaacttcaaaccctataggatgtggtgacttgggggttctttgttgggaccagaggaaagctgagaaacagctcggtgctgttgtgtttagcactggcttggtaaacaggagagtaaacacagacactcttatgcgtttaagggatgggctgtcaggtgatggagaacatgctcggattaaagttttattaggcagtcattgaaaggaagacattaaatggaaaaaagttctccgagagacctagactatccccaagaatgcatctgtggcctcccagggctttgccaagtgcagtctcaggacactgcttggcattcagcccttgataaattcactcctcccccagttcccagcaagccctgagatgaacagcagactttttgttccactttaatttttaggcaaaaccgaatgcccatcacaaagccccgttctccttgctactccccttcccccaacctagaggtatcacatttttgggtgcgtcattttctgtttggggtggcttaacaagatgagctgatagggttcccaggctgcctggagttacataacccattgtgcttccaggacagctcacaatcttaggatttgccctaacaagcaaactcagaaaactgctgaggaaggcacgggagggtggctgtgcgaggtactgccggggctgagctctcatggaggctctctctgttctctgaagtgcctttggagtttatgtctgcacatggcattggtttttcaattcgggcagcccgtcagggctcagcctctgccaggactctgccacggcaagctcattcggacaaacgcctgtggtaagtttgtttgccaggtctgtctgctgtctgttttctttgtggtgtggtcggaaaggagaaaagaccacaggagaagctgtctctctcttgctccgtgctgcttgggaggttgttcatggtcatgtggtagagaaattgccatgttgaatgataggcagagcaaagggacttcagagacacaactactgccctcaccacccccccatctcccgttcccaggtccccttgtccccttgcccaggctcagtaggtgcaagtgacacttgcagggcatgagcacagggctgagttgagcccagaccccctgcactgccactccctttcccttcacagttctctgcagtgggtggacagggtttctaaggcctcctccgcctctccagctctgatttctctaatcctatgtcttgtctttatcctgatttcttagatgctaacctggtatcttgggtcagcaaggagtttttcagaaggtgaaggacagagttagactgtctccctccctctctcccgtttccctctcttccaccctccctttcttttttgtcctttactaaatgcttgggcctgggactcggatccacaccccagtgatggagggcttgctaatcagatctgctgtggcttgtgtctcttgctgtggggctgacacctctcacttcctctaagctggtcagagtccagtggttgatgacccatctggtttctgtcctgtctacacgctgcttcctgagagctgtctgggccagaaaacagttaattcctgagagaagtgagctcctgttccattccagtcagttttaggctttaaaacatgtaaatcttattgaataagcctaaagacacttcaaacatgcatcttactgaggcaatcgtacttatttttgtgtgttgaagcagcgtgcacccagggccaggtttttactggggtttatgttaattcctggggtcagagagaggactggtcctgccctcagagcacagaggtgggccagggtgtaaaggagaagctgtaaaccgagtgagaattgcctaggaaaaatctgctaacaggagtagccctgcctgggaggactcttcatcaaagggccatggcttagaatttgttccttttattttgttgtgttgtgttgtgttgtgttgtgttgtgttatgttatgttatgttatgttatgttatgttatgttatgttatgttatgttatgttatttcgtgactcactgtattgcccaggctggttttgaattcctgggctcaagtgatccccctgcctcggcctcccaaagtgctgggattacaggcgtgagccaccatgcctgacccaggatcttttccttttctatcactgatttaagccataaaacttgatgtcttatcctctgaaaacatgctcaaataaaacattatggaattcttacacatcttattaattaaatttaaggccttgtcaatttctctctagtataatttttatttgtgttttctattgaaaatttataatctaaatgggtcttttatttggctatattaatgaaacagaaaagaatggacagtgaaatatatatcccttttacaacagagtgagaaaatgtaaattacaatgtagggaataacacatattttctaaatgtgtaatttagaagtttttttttttctccttctcttagtggaatctcctttatttcacagttgatttgtttttgcagatggaatgcagaaaggggccctgttatgctaatttctagagagagcatttgatctttgcaaaaccacagaaacattcacctctgccttttaaatatgctataaatgatttgggggccaccagctaatcttcctacccttcagttcccttatgactaggtgagtaggtagaatatttatcacaaggtttttgacataaattgtgaaatttatttaaaatgtcatttgtaagtttttttccatgtgattttggggccatagttctcaagtatttgatatatttttatcttctcctaactggttttagttctgcacttgaaacaaatttttttctctcctgtcctcttttctctcccctctcttctctcttctcttttttctccccttcccttcccttccctcccctcccctcccctcccctcccctcccctcccctccccttcctttttttttttacagagtctcacttctatcacccaggctggagtgcagtggcatgatcttggctcactacaacctccacctcccaggttcaagcagttctcatccctcaacctcctgaatagctgggattacaggcatgcgccaccacgcccagctatttttttgtatttttagtagagacagggttttgccatgttgcccaggctgatcccaaactcctgagctcaggcagtccgcctgcctaggcctcccagagtactaggattacaggcgtgagccgccgtgcctggccgaaacaagcttttcatgtatataatgtatcaatctttgttcaccccaaactatttttggaagctggcaaataataaattataataggaaaaaaaaatggcagtttttggcagagtggccaggtatgggcctcggcaccttcctgctcagccaaggtctgttgtaggaacgttgactgggagtgactgagaggattcagggtgcaccaatgccaggctcaggctgagcagctgggttggtgtgtgagtctgggactcatggccccagggggaactttggagtcagaaacttctctgttttcactgagccctgatctctcataaacactgaaaaacttgagcaagtcaggctgaaactatcaggagctgaaactttattttacttttagagtcagagtctcactctgtcacataggctggagtgcagtggtgcagtgcagtcatggtgtattgcaatcttgaactcctgggctcaagtgactctcccacgtccacctcccaagtagctgcgactatgggctggagccaccgtgcctggctatttttttttggtagcagtgggatcttgctgtgttgaccaggctggtcttgaacttctggcctcaagtgatcctaccaccttagctttccaaagtgttggaattataggtatgagccccagtgcccggcaaaggtgtaactttataactagatctggaagaaatataatgttataaatcctgttctaggtttctctagagaaacagagccaataggagaaacatatatcgaaatgtattacaaggaattgtgttacttgatggtggaggctgacaagtccaagatgtgcagttggcaagctggaggcctgggagacccaatggtatagttgcagtccaaaggcttgacaggattgaggcccgggaactggtgttccagtcctgaagaccctgggggtgggtcagcctgtttgctctattcagaccccagctgactggatgaggtccacttcactcacagtaaggaggcatctgttttactcagcctgcttattcatgttcatctcacccagaaacactaccacagacacattcagaatcattcttgaccaaatttctggccaccccatggcccagtcaaggagacacatattatacagttagccttcacagatcctaatggtgctgccatttactgaggagtagctctgtgcctggcaggtttccaagtgtggctcctggaactcatgttgtcctcagcacagctctgaggtgggtactgttaccaccttcacgtttgaggaggcacagagtaggcagcttaacctcttgtataaaatagggatccttgaggtttagacccggcagcattgttttctgaccctctttaagttactgttcttcattttttttctgttttactaatttcatttactgttaaatggggttttaaattatgaaaataacacatgcacgtggtaaaacttgaaagtgtaccaaaatatagtcagtgcagagcagctctcactctaccatcagtgcagtttaatgggtaaaaaaatcattccaagaagtttttatgcacatattcattttctaaaaaacacagatgggaccatatcctattccttgatctgcattgtaagatgattaaccatattacttaaaatgaattcacatactattaccttattctttaaaatagcgacatgatatcccattgtttggctttatcatcgtcatcatcatcatcatcatcatcatcatcagtcatttaattaaaccaggctgtggtctgaatatttgtctccccaaaatgagtatgttgaaacctaatcagcagtgcaatggtatcaggtggtggagcctctgggaggtggttaggtcacaggggcagagccctgatgagtggattagtggccttataaaagaggttttggagagctagctagcctgttctaccctgtgaggacagagtgagaaggtgccatccgtgaaccaggaaccaagcccttaccagacatttggtggtgcctttatcttggacttgtcagtccccaaagctgggagaaataaatgtttgttgttgacaagccaccagtttatggtattttgctctagcagcctgaacaggctaggaaaactcagcagctctcagtcctggaatacctaatatttctttttagaagaagcattttgtaattcatttttttgttacccttaaatgaaattcatagataacgaatcctcttaaaaacataattttatttattttatttctatctttttttgagatggagtcttgctctgttgctcaggctggagtgtagtagtgtgatctcagctcactgcaacctctgcctcccgggttcaagtgattctcctgcctcagcctcctgagtagctgggactatagatgtgtgccactacactcggctagttttttgtgtttttagtagagatggggattcgccatgttggccaggctggtctcgaactcgtgtcctcaagtgatctgcccgcctcgacctcccaaagtgctgggattacaggcgtgagccaccgcgcatggccaaacacataattttaaaagaatcagtataatgccttaccgtactataaaggagaaactaaagaaaaatgacatagcttgtatttcaaatgtcgctgaggggacgtggcctcattagaacacataatgagcaattaggccctgcccctgcaggtagaattgctgtgaagggggcagccacaaaggcagtgaagcatgctggctactcaagggtccaagacagaaccactgcagcagcccccattgatgggtgctgtaagttgttttcagttcttgcattttaaatggtgcctcaagcaccattcctactcactcttagaagcattggcttaaacagtgtgcaacaagaaaaatgcatacagtttaaagaatacactttgaggttttccaccttcatcttattcccagacctctgcctttcctcccaagggaatgactgttgcttatctttccaaaaatgttctgtgcatgcgtttgtatggtatgtatgtcccctcccctgctttgaaagctttctacacacgggaacatatactaaacatattgttgccttttctcctcagtaatctatattggagacctttccacttagcatacatccatcatattctttttgctggctgcctatttttcattgtctataaatcccacgattgatttaattaattccctattgtaagacaagtagattgtttccagtattctgcaaataccactgggttggggatagccatgttcccacatatttaaacaaataagtaatgaatgtacttgtgtgaattcctaggctggggactgtaatttgatggagtgagtcatagaggttgtatatggtgtgtgttcagacgatgtgggagaagtgtgtgggcgctcactgtctgcacccctggtatgagcacatttgctctttgccagctgaggtgtataaacggcagcagcccctgatcttgatttacgttcctcagtgtgtagaggctgagcattttcggtatttcctggaggaatttttattgtcttttctgtgatctgagataaatgcttaacagtttctacttttagctcatggagtgattgcctccaaaattctaattactatttatatcctatttttatactttcctttccatccctcatgtagcacatcactgcctggtaggcttggatttcgaattctggattttgaataccatgcggcacctgctgggcgtacctgaactttatatcaaggactcaccacacagtttatgatttgagtttttaaatttcccagacatctgccttagaaaacagaccaaacacatactgataggttggtccatcagagtgtgctctgggaagggttgtggaggtctcaccttgtaaactgctgtgatactgacaactatgtgaacaccagggtccagtgatgtttctatttccggaggagtatcttggaggacctttaagttttcctttcctcccttcgtttcattttttttcttctcaccctcttctctcctccatctctccttacccactttctgtctgtttcctctcccctcccctcctcctcaccctgatatctgtccttccccttgctgtctcctttcttctcttcctccatccccactcccctcctttctctgcttctctccacctcctcttccttgaagaaacaatggctttctttttttttctttttaataattatacagctgaggtggatctaggttggtgacgcctttagaagctttgcagcattcagtagagcttcttaagtacaggcagcaggcacttcacgggtcgtactgggttaatgttcttttgtgcttttccagcacatggaggaagggaggttgggcctgtggtcaactgaccctttcccagttgagtctgcaggttgtgagtgtgcagtaagtcttttgaattattagctggagttaaatgggaaggaagaggtgaggatatcaataacgtgaagcaggaaggctgaagaccgtgagttctgtggagggaacctgacctgcgggagagagggagggagaaagagaacagagagctccagccagctcaccctttggggtgactggaagctgcctagaaggtggttttgccctaatttacaaatttactgcccttttgaggccttatctggtccaggctcacttcctactctgctaccttctatcatggtgttggaaaagaaggagcgcctagcagggtgggccttttgagcatgggagtccacagtgtaccccttggagcccagttgcagggagagcaagatggacaggtggtttcatccagaattgggttttgctgtatgggtgccgtgaaagtcccacgagagtgagggaggccgagccttaggcaccagcgttgctggagccaaagggctgggggattccagctggacaggaagtgggcggtagaggccatgcagaggaattgaggggctgggggtctccatggaatagcggggataactgagggagagctgtgggggaagggggttgcagtcagggagggggtatctaaattccagatttcagaggtggcccgggtgtggctggcagaagtggcatgtgataggagggccgtggaggtcccagacttgagagctggggagtcaggtggtgtcaggtgtaggggtggcagtggcagcctggatgagtggctgcactcggtggagaggacggccgccaacctctaccggggcggagttgctgatgggtggacgagtgggcataggcgggggtaacccagctggatggcctgagtctcaagcgagcaaggatttttaaaggcaaatgggaggaaatgagagggggaggtggcccaaggagccagaggatgctggcaccaactccagacctgagtgcggcagctcagagcaagaccctaatcttgaccttccaggaggtttaaaccctagtttgattttgacctagatgatggaacgtttgcgtggtacgaactgaaccttcttagtgggagagatggaaatggttggaaagacgatggtgagctaagcctgtgggcaggggcccctccttcaaaccccagccacgcagagagggagagtcatgctgaggggctctgacgttcttctcttagtaggaattctgttcactttcccaaaccaacatgttcggtttcagcttatctcataaatataattatgctcttttgttcagctttgaaaaatcctgaccgtagaccattcaggttgtcataccttcaggtttgaactcattgcccagtgctattttaactgttgtttctccctatttatgtgagtagaaatgagaaggggcaaagctgactttgtgacagggcctggaagttttctgtgcccagtgtctcttcctttgcctttaatttgaattcaggctgcctgggatgtgtggtaaagaatgggcctgtccaggtgaggatgcagcaccatctagtgggccagagatgcactagcaacaggagacaggtttttgcaacttttggaatggattgaaggaaaggggagttaatcgtaggcagagactgccagggttaggaccagtggctcacacctgtaattccagcactttgggaggccgaggcaggagaatcgcttcagccaaggaatttgaagccagccactatgaaggcaacatagtgagactcccatctctacaaaaaatacaaagcttagccagtgtggtggtgcatgccctgtagtcccagctacttgggaggctgaggtgggaggatcacttgagcccagggtgtagaggccacagtgcgccatgattgtgccactgcactccagcctggatgacagagcaagagaccttgtctttcttaaataaaaaaatggtgacaggtgaggcaggtaacttagttgtgtagaagaaaagaaatcttctcccatctcatcttttctcctgccttgttccatctacctttattctcttcccatccactctgtttactggaactaattccagaagtagtttttgtaagggacggtgtcattatagccaagtgtggccatgtttttcttgtgtagactcatgtaaggagattctgatgggggtgtaatttcattcccatgtagtgaactttattcgagctgtcagtgattgtactttacaagactttatttatttattttgagacagagttttgttcttgttgcccaggctggagtgcaatggcacagtctcggttcactgcaacctctgtctactgggttcaagtgattctcctgcctcagcctccccagtagctgggattacaggcacctgccaccacacctggctaatttttttgtatatttagtagagacagggtttcaccatattggccaggctgtctcgaactcctgacctcaggtgatccacccgcctcagcctcccaaagtgctgggattacaggcgtgagccaccacgcctggccaactttacaggactttaaattagctgtgtgttagtcaagtgttgctgtaggagtgctaacagcctccaaatcctagtggttcctacaacatttatttcttgctcacagacatgggtcatctgaggattggctttgtttgtctcttatttggggatttgggccacaaagttgggacctacctaaggacatgttctcctctgggcagaggacaagagctcaagaggacagacccaaccacgccacacaggcatgcttagagcctcccactggacatggagttatgccggccacagcgaatcatgtggcccagcctgaagtcacagagttgtgaaatattttgcccatattgggcaaatagtgaaccatagcaagagtgattcaggaaggatgcaggaagaattgtggacaaagtgaacagcttagagtttagaatattcttaggtgacaggagtggcactgaatggccgaggtacattagttgctttcaggaaagcctcgtggtgccagtcacctctgaattattggcttcttctattagccctgcttgaggaggggaaggacatgactcttacggcctagagcaggagttggcaaactcctgtaaagggccagagagtaaatcttttaggtttgcaggtcagaaggtctctgtctcaactgcttgtctctgctgttgcagcacatgaagcagccatagacattccctagaggaatgggtgtggctgtgtttgggaaacacttttctttatgaaaataacagagggctgggtttccccttaagccatagtttgcagactcctggcctagaccttcaaggaatgacctctgtcatgacaccaacttaagagagaaccacctctttttagttgggaagccaaatagtattcaaagagctgttggtgagtccagcaatcctccacctatttactccgcgttattaagctgtaaacagtcgtttcaggtcattgaaaatcccggcaaccaaagcttattgttcttaagtatgaaatatcacgtacttatttatttattttttgagatggagtctcactctatcacctaggctggagtgtagtgatgccatctcagctcactgcaacttccgcctcccaggttcaagcgattctcctgcctcaccctcccgagtagctgggattacaggcgcacaccaccatgcctggctaatttttgtatttttagtagagacggggttttgccatgttggccaggctggtctcgaactcctgacctccagtgatccgcctgccttggcctcccagggtgctgggattataggcgtaagccaccgcgcccagccaaaatctcattttacctaccttaccctatcttcagaagaaatgtctgttaaaggtattagaagcttcttttaccttgggttttccaaacagttgatgtggaaggcaatttaatctttctcatggattcagagttatcttttgtgatatcttctgttttccagagatttgctgatgtgttaagggtatggtactgatgctggatgttttgctcattagcccagcaaggtcaaggttcttgtctcatgaccagggagaagtaggcacacggacactcagagagaggcgtcctgaaagcaggttgctggttctcccttcacagttgaatacaagggcttctctgtctgctgatggggctgtgttccctatttgtataaggtgtgagtttctggcggctctaccctgaccttccagtgtgcatgcgggcccctagtctgagccattccacattgatttatttcccttactgcgcatgtgttaagggactgaatttttcactgctggcatgtttaggcaagcctcctgtgcacaatgaccttggcagctcgaaagttctccagggaccctcccctgtctgcctaggaagagttctctgcttcctgcctctatcagtacgtgtgctcagcaggacttactttcacatttcttgtggttacgttttttcttgtaacagcttcattgagatataattcatgcttcatacagttcatccatataaagtgtataatttagtggtttttagtatgttcgtggggttgtgcaattatcaccagttcagttggtgaatctgttcaatttcagaacattttcattcaccccccgaaaagctcctttccctttagcaatcatccctcagtctcctcgcatctcccacagtgtggctgcattcttttttttcttttgagatgaagtctccctctgtcccccaggctgaagtgcggtggcgtgatcttggctcactgcaatctctgcctcccaggttcaagagattctcctgcctcagcctcctgagtagctgggattacaggcgtgtgccaccacactcagctaatttttgtatttttttttcttagtagagacagggttttgctgggttggccaggctggtctcaaactgctgacctcaagtgatctgcttgcctcagtctcccaaagtgctgggattacaggcatgagccactatgcctggccatgcgttcttaatacgctttcaaagatttctactgtcattgttcttgattccgacaggcttgcccctaaccttggagagcagtggtgggggatcgttcttgagtggtcatcgatgctattcgagggtacacttaacagacattttatggctgggctcgtgtctgtgatcccagcactttgggaggctgaagtgggaggatcacttgagctcaagagtttgagaccagatccaggaggagtggttccaacatggccgaaaaggaacagctccagtctgcagctcccagcgtgagtgatgcagaagatggatgatttcttcatttccaactgaggtactgggttcatctcactgcggcttgtcagacagtgggtgcagcccatggagcaggacgggtcatcacctcacccagtaagtgcaaggggtcggggaattccctttcctagcaaagggaagccatgacagatggtacctggaaaattgggacactcccaccctaatactgcgcttttccaatggtcttagcaaatagcacaccaagagattatatcctgcgcctggcttggagggtcccacgcccacggaacctcactcactgctagcacagcagtctgagatcaaactgcaaggcagcagggaggctgggagaggggcgtccaccattgctgaagcttgagtaggtagacaaaacagccgggaagctcgaactgggtggagcccactgcagctcaaggaggcctgcctgcctctgtagggaggcagggcatagctgaacttctgggggcacttctgggggcagggcatagctgaacaaaaggcagcagaaacttctgcagacttaaatgtccctgtctgacagctttgaagagaatagcggttctcccggcatggagtttgaaatctgagaatggacagactgcttcctcaagtgggtccctgaccaccgagtagcctaactgagaggcagctcccagtaggggccgactgacacctcatacagctgggtgcccctcggagatgaagcatccagaggaaggatcaggcagcaacgtctgccatcctgcaatatttgctattctgcagcctccgctggtgatacccgggcaaacagggtctggagtggacctccagcaaactccaacagacctgcagctgagggtcctgactgttagaaggaaaactaacaaacagaaaggaatccacaccaaaaccccatctgtacgtcaccatcatcaaagaccaaaggtagataaaaccacaaagatggggagaaaccagagcagaaaagctgaaaattctaaaaatcagagcacctcttctcctccaaaggaatgcagctcctcgccagcaacggaacaaagctggacagagaatgactttgacgagttgagagaagagggcttcagacgatcggtaataacaaacttctccaagctaaaggaggatgttcaaacccattgcaaagaagctaaaaatctttttttttttttttttttgagacagagtttcgcttttgttgcccaggctggagtgcaatggctcggtcttggctcaccgcaacctctgcctcctggcttcaagtgagtctcctgcctcagcctcccaagtagctgggattacaggcatgtgccaccacacccagctaatttttttgtatttttattagagacggggtttctccatgttggtcaggctggtctcgaactcctgacctcaggtgatccacccgcctcggcctcccaaagtgctgggattacaggcatgagccaccacgcccagcagaagctaaaagtcttaaaaaaagattagacaaatggctaactagaataaatagtgtagagaagaccttaaatgacttgatggagctgaaaaccatggcacgagaactatgtgacgcatgcacaagcttcagtagccgatttgatcaactggaagaaaggatatcagtaattgaagattaagtgaatgaaatgaagcaagaagagaagtttagggaaaaaagagtaaaaagaaacgaacaaagcctccaagaaatatgggactatgtgaaaagaccaaatctacgtctgattggtgtacctgaaagtgatggggagaatggaaccaagttgggaaacactcttcaggatattatccaggagaacttccccaacctagcgaggcaggccaacattcaaattcaggaaatacagagaacggcacaaagatactcctcaagaagaacaaccccaagacacataattgtcagattcaccaaagttgaaatgaaggaaaaaatattaagggaagccagagagaaaggtcgggttacccacaaagggaagcccattagactaacagcagatctctcagcagaaactctacaagccagaagaaagtgggggccaatatccaacattcttaaagaaaagaattttcaacccagaatttcatatccagccaaactaagcttcataagtgaaggagaaataaaatcctctacagacaaacaaatgctgagagattttgtcaccaccaggcctgccttacaagagctcctgaaggaagcactaaacatggaaaggaacaaccagtaccagccactgcaaaaacatgccaaattgtaaagaccatcaatgctaggaagaaactgcatcaactaacgagcaaaataaccagctaacatcataatgacaggatcaaattcacacataacaatattaaccttaaatgtaaatggcctaaatgccccaattaaaagacacagactggcaaattggataaagagtcaagacccatcagtgtgctgtattcaggagacccatctcacgtgcagagacacacataggctcaaaataaaaggatggaggaagatctaccaagcaaatggaaaacaaaacaaaaaaaaagcaggggttgcaatcctagtctctgataaaacagactttaaaccaaaaaagatcaaaagagacaaagaaggccattacataatggtaaagggatcaattcaacaagaagagtttgagaccagcctgggcaacatagtgagacctcttctttatttaagataaaaaataaaaatataataataacaaaatagacactttatgtgcactggagtcttgtgtatagtgactctatcacctgaataattactttttaaaattataatgttgtatttatttatttgtattctgctttgtaggttgtcctttggaattttccacattttgaatttatgtttgtgtttattggaaaattggttcaagtgaatgtggaatcattttactgtcagggtatatttgtttttcttaactgcatattgtcagactaatattttttggatgagtttgaaatcttttaatatccagatgatctcatttgatgttttgaaaaagtaaccattgttcatttttaaacagaatttcctgttcaggaaataatttagattaacaataaaacagatgaatgcattgaatggtagaggcacagttggcattgtgatttcatgagattttgtactattaataaaataagttttcctaatgtggcacttaacttttccagaatttaccccttgattgccagctaactttgcttgtcccctagttagagccacctttgaaggggaagacaggacagtcaggacagggggagggatgtgggccttgaactctggcagctgctcaggctaccttgaaagccttacagagtctaatcataaacattgggtagaaatgtttttggacaacagaaagcaagtctaagaaatcaattatttgggctgggcgcagtgccttatgcctgtaatcccagcactttgggaggccaaggcgggcggatcatgaggtcaggagattgagatcatcgtggccaacatgaggaaacccgtctctactaaaatacgaaaattagcctggcgtggtggtgcgtgcctgtagtcccagttacttgggaggctgaggcaggggaattgcttgaacccaggaggcggaggttgcagtgagccaagattgtgccactgcactccagcctggtgacagagcaagactccgtttcaaaaaagaaaaaaaaaaaaaagaaattaattatttataaacaagaaacttcatctgaactcccagattagaacagtaaaacccaagaggttggagggagatgggtgagattaagtgcaaaaagattattctatttttgctgtggataattaggaaaatacaggttaacctcttagcctgtaacctcttggtctgttaacctctttgcctgtacagatagtacctttaaaggtaactatctgtatcagtaaggattaagtttggctgtatagaacagtggcttcacattatagaatttatttttctctaaagtataagaagttcagagggagactgtgcagtactggtgcagccctgctgtccccagggttccatgctcttcctgtccttcagttctaccatactagatgtcgtttccatccttaaggtcatgtcacatctaagaaggctgcggaagctccagccatcatgtctgaattccaggatgtagggaaggcagcctttgagaaaggctctcacaccagtgcttttatctcattggccaacacttagccttgtagtctcattttgcagcaggggaggctaagaaatgtagtttttccatggggctcagagctttgatactaagaagagtatggatagcggatggccaccatgtgtctaccatgtctccttgactataattaaaaatatgatgcaggctgggggcagtggctcaagcctgtaatcccagcactttgggaggccaagtgaagtgaatcccttgagctaggagttcaagaccagcctgggcaacatggggaaaccccatctttactaaaaatacaaaaaattagccaagtgtggtgctgcctgcctgtagtcctagctacttgggaagctgaggtgggaaaatcatctgagcccaggaagttgaggctgcagtgagctgtgatcgtaccactgcactccagcgtgggtgacaggagtgagaccctgcctttaaaaaaaaaaaaaaaaaaaaaagattcaaacattcaacattagcattccctaacctaacccacatcatgaccctgacaagaaaacaatggtatttgcatagcatgatgggtaaatgatggaagtagttcttagctgatggtcaccccggacactacctggcaccctccattcccagcactgcttgtggaagctctgttctaaatcactaggagaaaaaagaatctggtggcacatactctacaatgcaaaagacagcaaagtgatgaaacctccagaagttgaaccaccaagaggcatgacaatagtaagatgagtcttgcccaatttgaccataatgctcctgtttgaaggcaaagtctcagaatgggtcaaaaagtgaagctttatctatgtgctttgcttaagaaattctcaaagtatgcaaaagactggaagttgggctaggagaaaatttagagaaagaagagttataaggagggattatttaatcagtgaggtcaggatctttggggccaggggcaggcgtgagtggtggttaggattttgacctccgagttcaggctctgttagaaaaccggttcactatttacaggctatgtgatgtgggtctaggtattcaacttctctgtgctgtagtgtattcattcttatgtcaaacggggataaatgttaggactcttaggaggattaaatgagttaatggatgtaaatgcttataagtgcttatggtaccactccataagtgtttaccattattactgatgtgtttgttatcattataagaaagtgcaactggatccctgcataactccatcaaacccaataaaatccagatggttcaaaaggtgattcaaagatgtaatgttggctgctaccctaggcacactgcctgtgaattagccctgctcagcaaacagcagttaaaataaaatagaaagaaaagatataatgttaaaaattcaactgtgaaagtgctagaggaaaatattgctggatattttactaatcttgagatgggaaagtccatcctaaacatggtataaaggctagaactataaggaaaatgactgatcgctttgagtgtgcaaaattaaactttacacaggcattctttaactgtgtatttgttcctgaaaacattgtgtgtgttcatgcacacgtatgtttattgtggcactattcacaatagcaaagacttggaaccaacccaaatgcccatcaatgatagactggattaagaaaatgtggcacatatacaccatgcaatactatgccaccatagaaaaggatgagttcatgtcctttgtagggacatggatgaagctggaaaccatcattctcagcaaactgtcccaaggacagaaaaccaaacaccgcattttctcacttacaggcgggaattgaactgtgagaacacttggacacaggatggggaacatcacacaccggggcctgtcatggggtaggggtggcgggggggatggcattaggagatatacctaatataaatgatgagttaatgggtgcagcacaccaacatggcacatgtatacatatgtagcaaacctgcacgttgtgcacatgtaccctagaacttaaagtatatatatatatatatatatatatatatatatatataaactttgtgtgtgttgcaaaattggacactaaaaataccaggagtaatgcaactttgtaaccagaacacttataaaaactgtccatgtggggataacttgaatagcccagacgggcagttcccggctgtggctggagccacacaaacaatagagggaaaggctgtggggtgtgtatgtgtgtgtgttgaggggtgggggttgatggatctggggcttctgctaaggtgagcacaggagaaaatacagccccctgtaagctgagagccatgcaaggctgaggtgctcctctctggggatggagtcctacacacagagctttttaagttcctatgaagtagtcctgaaagggttcctcctgcctttgcagcataagagctgaagggcttttttcccattgagggttgtaaacattcacactattctgacttcccttgcccaattcagcttcatgtgttgaattttgttgtcctggctgagccccttgccttttataggtggggtgtgagctttgccatttgacaaccaagctttttgtggcccaggagggagtagaggagtagaagacagaaaagcaagtcttgccttgtgtatttttgtgaccaggagaaaggcatcattttggcaaaagccccaggtctcccacaggtgttcagtgaaggtcctggccgctctgctcagtgtttgtgagggtcgattttcccagcgcagggcactgcaggtgcttgtgaagaaccagatggctgctcattccatcctgcagcatttattcagtgtctgctctggccctgagcagaccctgtctttgccctcttggagctgtgtagtccaatgacagagactgctggtaatcaatcactaaatcagtgactacaaattgtgatgggtggaaaatgccaggggccaagggggtaacttagcccacctatctagggaggtggccctgaagaagtcagtccatctgggatcagagggcaaaggggtggttggcagagaagggaaaagtgttccagacagaaggtccagaaggagttgtgaacccagaaaatctgagacggtgaaaaaagatttgacctaactgactccatcttgctcttaacctccaagctgtccttattcattcctggacacaggtagaaccaactttgggaggaactcatagtttagctttgaaacaaagaggataccagtccttttcccaaaacaaacctccttattgtccgtggactaggctgcctaaagccacaggattagaagttatgataatccttttttttttttttgagacggagtctcactctgtcgcccaggctggagtgcggtggcgcgatcttggcttactgcaagctccgcctcccgggttcacaacattaccctgtctcagcctcccgagtagctgggactacaggcgcccactaccatgcccggctaattttttgtatgtttagtggagacggggtttcactgtgttagccagggtggtctcgatatcctgacctcgtgatcctcccacctaggcctcccaaagtgctgggataacaggtgtgagccactgcgcccagccctagttatggtaatcttactaaattcaaaatgcatctattttgattaaacccatattattttcttatttattaaaaattacacgaagatcattctgttttgggctgggtttatagttttgtaacccctatgacaaaatttgatgccttatatagtattttacagggataagtatgaaatttgccaacacttgttttgaaagatgctgtgggctgacatcttcttttttttttttttcaaatctagaaaagagttttcacacttcccgagcttctccctttttcaggagactggttttcaaagcacttttctgtaccaggtgtgtgtcttctctggtcaaaaagtagcccctactccagagtgtactaagactccaaggaaagtttgggaagaggaattccatgaacctaatggtaatctaatccctttcctcagctcttacttttttttttttttttttttttttgagacgtagtcttactctgtcgcccaggctggagtgcaatggcgcgatctcggctcattgcaacctccgcctcctgggttcaagagttcgatactagcctggccaacatggcaaaaccccgtctctactataaatacaaaaattagctgggtcagctacttgggaggctgaggcacaagaatcacttgaacctgggaggtggaggttgcagtgagccgagattgcaccactgcactccagcctgggcgacagagcgagactccatctcaaaaaaaaaaggaaacaattaaaaaggtcaggagcagtggctcatgcctgtaatcccatcactttgggaggcaaaggcgagtagatcactggagctcaggagttcgagaccagcctggacaacatggcaaaactgtgtctctactaaaaatacgaaagttagccgggcttgttcacacgtacctgtaatcccagctacttgggaagctgaggcacgagaatctcttgagcctgggagatggaggttgcagttaggccaagattatgccactgcactctagcctgggtgacagagtgagactctgtctcaaaaaaaaaaaaaaaaaaaaaccaactaattttttgtttgtttgtttgttttaaagagatggggtcttgctatctcctaggctggagtgtagtggcatggtcacagctcactgcatcctctaactgctgtgctcaagggatcctcttgtctcagcctccccagtagctggggctacaggtgtgtgccaccacacttggatttttaattttttttttgtagagatgaggtcttcccatcttgcccaagctgatcttgaactcctaggctcaagtgatcctcctgccttgacctcccaaagtgctgggattacaggcatgggccagcgcacttggcctaacaatgtcattttaaaaagtattataggccagggcgctgtgcttatgcctgtgatcccagcactttgggaggctgaggtgggcggatcagttaagcccagttcaaggatgtagtgagccataattgcatcactgcacttcagcctaggtgacagaatgagaccctatctcttcaaaacaaaacaaacataatatttgccatttaaccattaaaaaaattaattttctcaaaagcattgttattctactctactctctactctctactctactcctactcctacgcctacgcctacgcctacccctacccctacccctacccctacctctacccctacccctacccctacccttcttttttgaggcagagaggcagagtttcactcttgttgcccaggctggagcgcagtggcatgatcttggtctctgcctcctgggttcaagtgatcctcctgcctcagcctcccaagtagctggaactacaggtgtgtgccatcacactcggctgatttttgtattttttagtagagacggggtttcactatgttggctaggctggtcttgaactcctgacctcaggtgatccaccgacctcagcctcccaaagttctgggattacaggcatgagccactgcacctggccaaaagcaccgtttttcttttatagagacgggatctcactatgttgcccaggctggtctcaaactccagggctcaagtgatcgtcctgcctcagcctcccacagtgttgggattacatacgtgagccactgggctgggcccatttaaacattttaacgggtatagttcagtggcgtttagtacattcaaaatgtgcacccataaccgtttagttccagaacattttcatcaccccaaaaggaaaccacctccccattagcagtcgctccacattgtccctttcccttagcctctgccagccgctaatctgctttctgtctctgtggacttacctgttctggacatttcatatgaatggaatcattcaatatgtggtcttttgaggccggcttctttcacttagcataatattttcaaggttcaccatgttgcagcgtatatcagtacttcattgcttactgtggctgaataatacttcagtatatctacacattttgtttatccattcatctgctgatgggtgttaggattgtttttatctgtgctactaagaacacgggtgtataaatatctgtttgagttcccactttcacttcttttgaaatataagcagtggcaggaatttgctgaagtgaaattgctgcaacatatggcaattgtgtttgactttttgaggaacctggttatgcatgtttttaactttgtcacgtgtaccgtaaacatgcttatgaattttacacttcagattgtttttattcctttcttagatttaatcccaggtgcaattactggtttaaggatcatggacacatttttggttctctaaacatactgtcaaactgtttactgcaagtgttgttccaatttacaccagctccatctgtctaaacactagttcagttgtgagcactttaattacattcatacagcactggatattttcatgtaaaataatcttcccttggttatttgataattgtagcatgtaacatacttaatttttttttctttttttttgagacagagtctccctctgttgcccaggctggagtgcaatcgtgcgatctcagctcactgcaacctctgcctcctgggttcaagcgattttcatacctcagcctcccaagtagctgggattactggcgtgcaccaccacgtctggctaatttttgtattttttgtaaagatggggttttgctgtgttggccaggctgatctcgaactcctagcctctagtgatctgcccgcctccgcttaccaaagtgctaggattacaggcgtgagccactgtgcccagccaacatatgcttttaagagaagttaccaagactattggaaatcaaaagtattttatctttttatttcctagcaaaacaaattcaaatcgacagtaatagtctattttttgagtattctcctggagatttaactctgggctgaacttatacacgttaactttcacgtttaaaataaatttgtgtacaatttttgctttgtgttttaatattagaatcaatctaacactaataacctgtactgtaattatcgcctgtttttttttagttgtgacattttggggcctccgtaacaggatccttcctccctttcctttgccctgcccttcttgtcctttcttgttgagcaacaaactggcatgcccaagtggaatgcgccacattcagttgccctttagcctcacgtcggacaccctgtttccaaacacggctgagtcggctggattggctgtctctgtgcgactgcttctttgggggtatgtgtcaccggggctggtgcatgtatgtgtgagtagatggtaactcggtacgtgacaccaggctatgtggaactcaactgtgtaattttgtgtccgttttcttagaaagcgtttcttctgttggtaattaaggccatggaattctagagaactccccagtgttggttttcgttcctgtctctgaagcatagttagtctttcctttcccatcctatgagggtttctctgcttgtccttctctcttctggagatcccctttgctgttcacagcaagtgagctgtccctcagtggggagagaggcagaaaaggaagacttggacctatcccttgtccctttgtggctggggtgtgagccagggtggagtcggaggtcttgcttccatttctgccactgcttagccttgagacttcccccatgtctctgaaccttgcagggccacagtttccccttctgtcttttagatctgggtctcctcatttatgaaatgtgttcccaatcctcatcctgcactgcctgctggcttgtgagagtaaatgaaaggcagtaatagatacaagtgctttgcgttgttcagcaaacatttattgaacacttactagttaccaggcagggttccgggtgctgggcaaacagcggaaagcgaatcagcatctggaggtgctgtcgctacatcccgaggcctcttgcatggtgggacctgccgcaggccaagcacccatctcgagtctgctgctggtttgctctgtgacatttggccacctcctcagcttgaacacagtgtccttttccattcaatgaggaggttgcgccagtagtttttagctctaatgtcctctttgtaatttgtggaatcacaacttttgtggtatggaaagtaattactaagactgaatctctgaagatgttcagctaaagctgtaaactgcatagtcccttgatagagaggaattttctagaaggttgtctgtcagataccacttacaaagtatcacatacatctccagcaccagtgtggcctatgtatgagtctttattcctgccctttaatccttataattttaagaaaatggaattgtttccaagtctgtacagaatggtttccaagtggctgagtaggtgaggagtgttgtcttgtgaagtcattaaaacattgctgtgggtttgcagtcactgccatgggtaatgtgtcatgagagagggttattgcctctagccagagcgcctgcctccccaagcatagccaggggtcatgctctgcacccacctctctgatggccaagtggaaagttggtgggtaaagaaatggagtgggagagggacagggaggaaaaaaataaaaaagatggacctctgtatggtggccactatttgatgagcgaaggtcccttttcttgttctttgtcacctttaatgtggtctgtagcattctctgaagtcccagagtgtggcgccaggatggaagtcccagtgtgcagactggaggcatgcatgtttaatctggccctcagtattcaacatttagaaatcagggactctcataaaaatacagatccctggtctcttgggtggagtcagcatgtcaaggactgggggcgtcaccgggaagtgctgtgagtggcggctgccccccagacacagccctcagaatgtgcaactcttgctctcaccgctcagagaaatttagggtatgaagaaagcttttctgcagccacttacctttgttctacagaggaagaaactgagtcccaggcatatgaacatgtgatttgccagagtgataggacgaagttgagggggcagaaccgaggctgggcgtcctttctccaaactcttgaaactgtgctcctggccggcacccagggcctctcggcttccagcaggtggcagttgtggtgctggtttcctgccattgcctctttctggcattcctttcctccctctcctgttcttctctcctcctttgcttttgcttgagctttctctcactaggtttttcctctttctctctcctgtcttttattcttccctctccccttgctgttttctcagatctcctgccaactgggtgagtgtctagggctactttccttctagacagctcttctgcacactctgctcaccttgcagctactcaggtccctgttctcctgggcttagagccctcaagctccagcgtgcaggcacgaggcccagaaaccctgttggaatgatcgcactccctctctggaggtggccaccactcagagcatttaactcctctgtggaggaggaggtcccttgatcctagataggctgacttcttctgagagtccacatatctgtatttcttcttttcttttttttttttgagactgagtctagctctgtcatcaggctggaatgcagtggcctgatctcggctcactgcccaacctctgcctcctgggtttaagcgattctcccgcctcagcctcccgagtagctgggattacaggcacgtgctgccacgcccagataatttttgtatttttagtagagacggggtttcaccatgttggccaagatggtctcgatgtcctgaccttgtgatccgcccaccttggcctcccaaagtgctgtatttttattgtttttagagggagtttcactctgtcgcccaggctggagtgcagtgctgcgatcttggctcactgcaacctccacctcccgggttcaagcagttcttcctgcttcagcctcccaagtagctgggattataggcgtccaccatcacgcccatctaattttttttttttgtatttttagtagaaacggagtttcaccatgttggccaggctggttttgaactcctgacctcaagtgatctgcccgcctcggcctcccaaagtgctgggattataggtgtgagccactgcgccccgctgagatctgtatttacatgaggttctctgagtgttaaatgttggacactaatttagagctattgcctttgctgtaaaatgtaagcattgcctcaggcacctggcaggttttgtgaagctggcatgtcacctgagaatcagtgcaaatccctagacggaggagtctcctcctagccgctctctgcaggtgaggatctagccccagtcaggtggagaatggacacagctgcttctgcagctctgcaccttccaggtgccaagcaggctccagcacactttcttcactccctggtggccctaactgaagcccacatcctgggtaggagggtccattccaaatcttacgccttgggaaaaacctaggaagggttatacctctgaagaggtaaagagtccttttaggttattttactttcaaagtgatgtcataagaatggtaggtattggattgacatctgctgagcaattgaggggacatttaccatcccatgggactttcctctatgctggataaagacctagggtgatactgaggtgggtttgaaaagaccttgacactagatggctccacctgcctcatgttgcaggctgggcatgtgtctgtcctggacaggcaggggattcacagactagtcctgccaccggctgctgctctctccttcccttgttccatcactcttctcacacttactgttgcctggcaaagtagtaagggctgggctgaaggtaaggtggataattcaaagccttttctcttgaggggctcacaattagtagggaagagccacagagaatacacttctaacatcgtagtgaagtcatttatgtactgagaactgtggaagccagagaagagaggttaagggaggctttgcaatagagagtgacatttgaatgatattttaagatggagtttgctaggcagtgaagggcattctagggagctaaaacagctggtctaaaaactcagatttgtgaaaaaaatgtgtttggaaaatggtgagaagttggtatgccttaagtgaagggaaattggagaaaatagcagaggctgggcttgataagaaaggctgttagggtgttgagttagctgctttaacagagaccaaagtaattggaactgtagcctcaataaggtagttgtttatttcttttacttttaaaagttcaagtggaaggaggtccagggtgtttcaggcagctgaggtagctctggtcatttcctgggcattgcctttactaatttagctaagcatggctccagcaccaggccaactctgcaactggacagacggaaagggcatgacttggaagttctgttacatcctgttaaccaggcatgtggatacaccttactgcagggaaagctgggaaacacagtttttagctggttggccgtgggcccagccacatcttgggggttgcatgaccaaaaggaagaagtggcaattgcatactgggaaacactcagtagcctctcctgtagaaacgtagaggcagaatgatgaagcactttatagggagctgggaggtttttaaagagcaatagtatgatttaaaaagctctttgagagaatgagatgggagggtcatttgaggtcaggagttcgagactagcctggtcaccacagtgagattccatctctatttaaaacaaaaaataaaaaaataaataaataaaaagctcttttccagaaatggcaccagccacaatgtggccggccaccatggggcattacagtaactgggcaaggaggcgatgccgaggggtaagcctctccttatggttgagcctggccttttgatggtttgacaggctgggggttggtgggattttgggctgttgttattgcatatctacctgaagccatggacctttgggctttgggattggtcaggaaattgatgcccttcatttgtgacttatttgagaacacattttgacttgtttacattagcttgttactaatgtgaattgtaactgtggggaaatggtgaccacagagagcataaagggttcctttcctccatggtgggccggcagtgtccattcacagcaggagcttgaataagctcctgtcctgtgcaggttcctgaccctccgtggttctgcagacaagttagtaaattcttgcctctgcttcctgtgcttttttttgttttgttttgtttgagatggagtctcgctctgtcaccaggctggagtgcagtggtgtgatctcagctcactgcaacctgacctccgcctcccaggttcaagtgattctcctgccttagcctcccaagtagctgggtttacaggcgcatgccaccacacccacctaatttttgtatttttagtacagacggggtttcaacaagttggccagggtggtctcgatctcttgacctcgtgttccgcccacctcagcctcccaaagtgctgggattataggcgtgagccaccgcgcccggctactgcttcctgtgctttaaaggggaaaattattccaacacctccctaatttgtgattatgtttcattttacatgcctaccacaagtatgaagtcttccacctgtttagaacaaaaacttcctgatgatgacatcctgggaattccccagcatttcaagtgcaccctcctaggagctgggtagcaggtgttggaggggagatcacagcttttagtggaacagctgaggctgctcctacctgatctgctgcttagttagctgaatcaacttgaccaacaagatgtgccgcagccctcgtgcatcccagcttactgatctgtaataacaggcaaatctctgtgtgccacattgctgggacggtgagacaatggtctggcttgatgtttggcatggtgaaagcattcctggggaattcttttttttttttttttttgagacggagtcttgctgtgtcccccaggctggagtgcagtggcgcagtctcggctcactgcaagctccgcctccggggttcacaccattctcctgcctcagcctccctagtagctgggactacaggcgcccaccactgcgcctggctaattttttgtatttttagtagaaacagggtttcaccatgttagccaggatggtctcgatctcctgacctcgtgatccgcccgccttggcctcccaaagtgctgggattacaggcgtgagccactgcgcctggcctcctggggaattcttgaagactcttctgttacgtttacctgatgtcaggccttggatgtgtcctccccttgaggcaaacatggtgtctccttccatagggggtctgtggggcttttggccttgtggccaaggttaaggagagctgcacgggccatctccataatcctatcccatgtcctaattctttgggcctttaaagcatctgaaaatttgctgctaatgtttataaggctggtcatgtcacagaaaaatcaaatatacagttgttttttttttaaaaacagagtctcgctctgtcgcccaggctggagtgcagtggcgtgatcttggcttactgtaacttctgcctcccgggttcaagtgattctcttgcctcagcctcctgagtagctgggattaccagcgtgcgccgctatgcctggctaatttttatacttttagtggagacagggtttcaccgtgttggccagtcaggtctcgaattcctgacctcaagtgatccaccagcctcagcctcccaaagtgctgggattacaggtgtgagccactgcgcctgggccagagttttttaaaaaggcattttttcatagccttaccttttgatactttatctcactggtcatatgctttaaggaaaaagatatcacatgggcacaaggacccacactgtaaataggttgaccttcagccctggaaacatggaaggacgggtcaagtctcaacttttgggcaactggaagcatgctcataagtgagacattattctgagatttcttagaagggacttttttttttttttctggagtctgttgccttccccaccaccaaacagcattgacaccagatgattccagcctgttgtgtgggtgtgtcatgcgggaatgtgttggttccctgcctgttctactagggataggctggcactgccttctgtggagctgctgtggagacagtttgaccagatccatgtttagccaagagatgctaccgactaggtgtcagccctgtttaaccccatgttccctcagttacatggtggcattttgtggctgtgaggtctttcctagagatgaacttcatgggaactcactctttgcttgatagtgagaagaggaaatgttgcttattgtgggcccatcttgagcctttggatggtggtttattgctagtgggagatgggaagaaatgtgaaaaatcttctgccttgaggttgggctattgctctgcctgggggaggacatagcttctgttcccagcagagctttgcaaagtgacggagcaggtctggtcttgtttttggctggctgaaataccaagtatgcttgctgtgacatttcccccatgaggcagagaagtcccagcagtgagatagagtcccccctccaggactaaagctccaactaaaattctgaatgtcctcactttctcatttttaaccctttccttgacattttggaaaaccatgctgacttcctgagtggaaatgctctatggcaaagctttgcatattgaattgagggagagcagttagtacggaatggtaggaagctgcgggaggggtgggtgctgacaggtgttctcagtgggctcctgcccaaagggtgatgagtcataactctacgttctcttttctcacgaatccgtatttttttcacctgttgaatggccttcttatttgacacaaagtctctggcattgctcttcttccaggcagaggtgttccatgttctacctgagtgtgtacaggccccacagttactgcctttctgccttcctgccttcctggccttggctcaagcagggggaacagggaagggactggttctccctgctgttcctgctttggttctgcagtgaatccctggccctggccctgcagtgaatccctggccctggcccttcctgcttcctgtgacagtagcctcccgtgtggagcaccccaggatctactcccactgactgcaccagtcatttcctgtgtgtgtgcagacatgcacgcatgtgcgagtgaatgctcatatgtaagactgggcctttctcctttaattttatcttaccgtgtttaggaatacctcatacttttggttcgtcctcagcatctcctctttattttccctgctattgtgtggttttatttgtcacaagtattttttttttttctctcctctgccccttctaatatcttggagagggatggagactgaagagtgagtttggtcctccacttgatccaggttcttatttttgttttctacttcaaagcgagaacttggtactgtgactttgataagaattgacttcaggcccagcaagatttctcatgcctgtaatcccagcactttggggggccaaggcaggaggattgcgtgagcccaggagttcgagacccacctgggcaacatagggaccttgtctctacaaaaaataaaattagctgggtttgatggtgcacatcagtggtcctggctactcgggaggccaaggtgggaggaatgcttgaggatcggaggtcaaggctgcagtgagccaatattgtgccactgcattccagcctgggcaacagagtgagacactgtcttaaaaaaaaaaaaaagaatcaacctcagtaatattcttatcttttgaataatttttctttgttgaagagtcattcctagaacaaaataccaagttaactctcctctcctgtctagttgtgtgcaccacaggcacttggtttatttatgggttgacaaaaccactgctgttcccatgggctgtttcccatcatagggaatgccttatgcaaataggctgatacagtggatgatgccagaattagttgatagataattaccactcacccattagcacttatttaattcagtctctgtgttctgctttgatgagtaagcactgggatagagaagtagggtacatatcctggttatgtttgccatgttgtcatgtttgcattttaaaggcctgcattaatgtgctttgtgtgaattggttctccgtcacaggcattagtatgcaccccctgagcacagcctgggccaagagctatggggtacaggtggtggatcaagggtagctgtgtatggaagtttgccctctcccaacaagatgaatcagacactgaaatacccacaagacacttaataagtgtagtaactgaagttctgacaaaatggcatgtcagtatagaaagggtaagagagattaattctgcttggtgtgctcaaaacaccaagctattccttaaaggatgggcacctattggtgtgattgctggatgccccataaggatataagtgtttcaagggcaggaccatgactcttgtgttcaccactgtgtctcctttgcccgtggtactcaggattcaaatggatggatcgatggaaggaaggaagtgtggatgaatgaacagatgaatgaataaattaaatgaaggcaaaattctagataggaggatagcttcaatggtaaaagagtggcatgaagaagttaggcatactggtgaaattaatactggtttggctgacatgtagaacgcttgaaggagaatggccagagaaagggttggaggaaagacttaactcagatgataaaagctcaaaaattttggcttttcttcctaaatagtggacactaaacagcaggaaacatttgggtaggtcttggccgtaagcatgcacaattcaaagttttgagactagaatttaaattggaaaaagactcctgatatagccttgtctagcttctttgtgctgtagataaataaccgaagatacctgccgcaggctacaagtttagttaactagcagcaaggccatagccatttctgggctctcatttcttggttgtcttgtctttagatgtgtgcaacagcaccgatcttccggaagtcgagatcattagcctgctggaggagcagctgccccattataagttaagagccgacaccatctacggttatgaccacgacgactggctccatacacctctcatttctccagatgccaacattgacctcacaaccgagcaaattgaagagacgttaaaatacttccgtaagtagttgtccatgtgtgttgtgatggcagtatcatgatcaggtcttcttagccatggccccaaataagatcttgtactggctaccctgtgatgtggcttgccacctctggaaaggtagtcaaagaaatgcggctgtaggggttaaccgcacaaaaggtcccaattttaaatgttctgaatagaaattttagaggagtgaggaccaagtaagattttcatttgaaccaactttttatgtatttatttttttgagatggagtctagctctcttgcccaggctggagtgcaatggtgtgatctcggctcactacaacctctgcctcctgggttcaaacgattctcctgcttcagcctcccgagtagctggggctacaggcgcgcaccaccatgcccggctaatttttgtatttttagtagagacagggtttcaccatgttggccaggctgaccaacctgagcactcctgaccttaagccacccacccaccttggcctccgaaagtgctgggattataggtgggagccaacttttttttttttttgactgtacagaagaatttgaaaatgttcctatttctatttcttaccaaaaatacaaatccttagaaactcactgggaaggtgtttgtctaaatttaaaaccaaagatattgggaatatccaggcttctcatttatgtgacatagcaaaatatgtgtaccaaggctgataactgttgtgtgaaagctcactaagctggatgtttggagagtccaaatatcactgcagcagcaaaccagtcattctgatgggctgcagagctgatacctggtaggataagcagtaaactaggtgagtgttttcagtgtggtcatgatggccagggtgtgaaacttgatattgcagacttgaaaaaaaggataatttaaaaaatgaatactttatgattctggtatttattcaaaatgtgcctttttagaagtaatttcactctttaaaaacttatggcagccaacaatttacatatctgtgtatcactgtgtcacttaaaaaaaagtatagcaatcctcctacctgcagataacttggttcaaaaccagcttatgttgcatctttaaagatttcttgtaattatttttactaatacaggctgatctctccaattttcttgaatttgtgagattatttgtaataaacaaattggtactgcaagtttctcctttagggtgtatctagggatgttttcagttctctttattagatattaataagaaaaaggttttgcttacattgacccataaaccctacagagtctttgtgaatactgcagataatcagtttcaatatggataataacagaataatccacaccagggtagatatgaagcatgttagaattgtactcatattgaagttaaagctttagaatttctaatgtgtcttgtagcatataggaggctcttagcaagtcattttgttgattcacaacgtctgtaccaccaaggagatatgtggtatcatatggaaaactgagtctacagtaacctccttggtagattttgtatttgcttttttcagactgtagacgtctgcaaaaaaattcacaagagaatagtagagtttgtaacagaattattttttgggaaatctctctgcgttacttacctttccttaggagaccctcttgtgattctgcagtacctatcatggccatttctctcacaggaggctcctgggtcccattcatacactttttttttttttttttttggttgagacagggttttgctctgttgcccaggctggggtgcagtggtgcacatatggcttactgcagctttgacttcctggtctcaagcaaccctcccaccttagcttcctgagtagctaggactacatgtatgtaccacgtaccaccacgctcagctaatttttaattttttttggagagatggggtctccctatgttgcccaggctggtgtcaaactccaggcctcaaacaatcctcctgcttcagcctcccaaagtgctaggaaatcaggtgtgagccactgcacttggcaccattcacactttgattaatcactgacatttacagtgtaattggaagaccatccatgggcaacaccacacaattttcagagaacattcacacaaattgcctcatttcattcctgtaaaatgcctacagttgggtagggctggttttatcataggtgaaatggatgtgtgaaaggctcagtgtttactccatgacactgagccacagtttctaaaatctgtttaacagtagacttgaggccgggcgtggtggctcacacctgtaatcccagctctttgggaggccgaggcgggtgaatcacctgaggttgggagtttgagaccagcctgaccaacgtggagaaaccccatctctactaaaaatataaaaattagccaggcatggtggcagatgcctgtaatcccagctacttgggaggctgaggcaggagaatcacttgaacctgggaggcggagattgtggtgagctgagatcgtgccattgtactccagcctgggcaacaagagcgaaactccatctcaaaacaaacaaacaaacaaacgaaaaaacaaacagtagacttgaacagagagtgagtgtcttttttgtttgtttgctttgtttttagttatacagttaagaaaaaaggagaaatcctggtagtagataacacaacttatgataaaactggaagaaccaaaataaacattgagcagagattctgaaagttcttagagcctgcttgcctccaagccttaacttaattctgtatcttctgtggttcctgtagttagagcaacatagctatttcctaaatatctgttaattgaacgatcaggtgttaactcttaaatacaggaccctgtagagcagagctctctcactaaggtcctgctacccctaaagggtctgtagagagaatttaggggttccatgcacttaaaaaggagcaaaaaaattacttttatttttattaacttctaactgaaatgcagcatttcctttagttatgaacatagacacacataggcacagtggtattagcaggacctgtgatattgtcaccagtagaaatcacagatattttcatgtcatgcttcagtggaagcagttactttgaataactgcctttgttcatcactgccatgaagttacatttgttgttaaatgtgctgatagatcttttatttcatgtcacagttgggtagagctgttttgttataggtgaaatggacgtgtggaaggctgagtgttgtggaatacactggaattctgtcttatttatttagatcttttatttcttttattctttaataaagaagcacttatcagatatcacagcctttttttgtcgttgttaatatcccagagtttttcaagttttagatggaattgttttccttttcagtcctttgtattttacgtcttcaaagctttctcctgaggaaagggtctgtgagccttgccaaactggcagagcgtcaccagaaggcacaggttcagagtcctgctgtgtgcatggtatcctttttgggtttcgtgtgtttgtttacacgtgtgtaaccctggagatgctgtgactcaccagtatgttgtatcagttttgaggcgtgtgagaagacaaggtagcctgcatcgattagggcagaggttctcggttgtgggcgggcatggggataaggagcgctggggttctgatacgctcccctacgtgagaaatcctagagaagagggccagctacacattgctatgcagatcagagcagacacagccccttcctgcacatcctccccctgagtggagaaacgcggctttaccttttaaatttggccctcacttgacttcctaagaagaggcgagaaagctttgggcatccacctttgccaggtggtacaatgaccttttcagagaagttttagtgcttctcccagtcaggtggacttgtaactcctgagtctgagaaacacagaaaattaaaatgacccacaaaacaaatatacccacaacgatgggacatttgggagaaagcatagtcaacgtacggtacttgcagtgtgctgggtaatcctcagagtggcctgaatttaatactcttgcattctgcacatgaggatggcgaggctcagggaagttagggaaaagtcacatacctagcaaggtgagtcagacctagtttgtctggtctgactccatctcttacccagtatctcagattagctacaaaggggacaagaaaacttcttgtttaagaatgaaattcatctggtgaaatacaaaaaaagcaaaaaccccatcaaaaccttagtttcaaaatctgtcagtagcttatttatttataaataaataaaatatatgtctaacatattcaaaattcattttttttcatggctcagggcattgtcccaagtgacacttagcttgatacagcttaatttgaagatgaggtttcttttttccctgtgattttcacctccatcctgtggcttgtaggtcacacttccctaatccctggtggaaatgacagtgtgtgctatagacttttgtagtcacataacacgcagcagacagcagacatgaaagctgctgcattggtctttaggtggctatgcaactctttttggtcccttcttccaggggctgttctatgtaactttttggttaaggagcattgattgagggaaaaaaaaaaaaatccatatctcacctgcatatgatctgcagaccaccctccctgagtttacctggagcagctttttcctaagaagagaaggttatgaagcaaataagagtttcaaaatattgttccatcgtttgcttttactgtaaagtaatattaaggaattagccaacagtatttactgagtgactggtatttacctctgatcctttgaggacttgtttgcatttcagctcaggttttctgactaaggagataaaaacatctcctggactatttatttttttccgtgacctaacccaaggactttgcactgggttggaccaatgcaggcagctcttgaggccttcggtgccatcctaccctgagttgcttactttgcttatgtgggaggagggaggggggtctgggaacctgcatattaaaccagctccccttgccattttaacttttaaaaattgaacttaaaagtaaacaacaacaacaaagacctttaatctagtccaaccatcattgttcacatggggcccctgaggtgcggggtgcattgacttgctaagccttgcacagccagggtatgtggggccaggaattgtgtgcaggtctcctcaccactctagagttgtgtccataaagtagaacctacagtaatattattatacccccattttcacctttgctcattcacttgtgtccacacggtcacagacatagcaagcgtttatacggttggttttatggggcaacgaacctcatgttttttactcatgcagggctcatcccaggagagtgggaatttgctcaagataaggcatgaggacccggagtatctggcatggagtttaactggaatccctctacctccaccactgtacctggaggctcctgtctcccctcatcctgtttgacccttgagcagggccgacacagtggtcgctcccttctggtcactctcctggcttggctcccagtgcctcacttgcccccagagttcccttttgtctctctggacagtctttccagcctctttcaccagttctttctttttcctcttcctctgagcttccaaatcagtggctgtcaaccctgatgcacctagagctttaaaaaatatagtctgccaggcgctgtggctcatgcctgtaatcccagcactttggtaggctgaggtgggtggatcacctgagatcaggagtttgagaccagcctggctaacatggcgaaactccatctctactaaaaatacaaaaattagccaggcatggtggcgtgcacctgtaatcccagctaacttgggaggctgagacaggagaatctcttgaacccgggaggcagaggttgcagtgagccgagattgtgccactgcactccagcctgggtgacagagtgagactccatctcaaaaatgaacaacaaacaaataaaaataaataaaatttaaaaaaaaaatacaatccttggccaggcgtggtggctcacgcctgtaatcccatcactttaggaggccaaggcaggcagatcatatgagcccagaagttcgagaccagcctgggcaacatgatgaaaccccatctctacaaaaaattaaaaaaaaaaaaaaaaaaagctgggtgtgatggtatgcaccttgtagtcccagctactcaggaggctgaggtggtaggattgcttgagcctaggaggtggacgttgcagtgagccaagatcgtgccactgcactccagcctgggcaacagagcgagactctgcctcaaaaaaagaaaaaggaaaaaaccagccctggaaccagtcccctgcagataccaaaatccatggatgctcaagtccctgatatgaaatggcatagtatttgcatttaacctgtacacatctttccatatactctaagtctagattacttgtattacttgtaaatgctatgttttttgtttttttttttttgtttggtgtattttttttttttgagtcagtcttctcctgtcacccgggatggagtgagtgccttggtgccatcttggctcactgcattctcaacctcccagactcaagccatcctcccacctcagccccccagtagttgggactacaggcacatgccaccatgcctcgctaactttcatatttttttgtagagacagggttttcaccatgttgcccaggctggtctcaaactccttggctcaagcattcctcccacctcagcctcacaaagtgctaggattataggagtgagccaccatgtccagcctaaaattttgtattgttattttatattgtttttttccccctgaatatttttgatccgtggtggatacagaggcctgactatatatcctccccaggccccaccgtcaggcatagtcattctaattgatcctcaggtgactgtgatgtactcctctaaatgttggcgtgcccagcctgcttctgtctatatcctctctcccaaggctgtaataccagccacatgttggtgactgccaaatgtatgcccaccctgaccttcccttcctccctcagcctcatgtacccacatactgagattattaactcatccattgcggaaagtggattgttccccctccacacacatttgtcttaataaatacaacgtggtttaccccatttctgtatcctcctggccatccactggccctgttaattcttcctccagatatatcccagacccgttctctgacctggctgctgccacccttgatgaagctactgccatctcatccctggacagctgtaactgctctcccagcttccactcttgcttctctgctgtactctttggacccagcagcctggcttgtctttttttgaaatccaactgggtcatgccgctcctttgtttcccattgccctttggataaaatgcggggtcttcggagactctgtgacctggctcttggctctatccagccagcctcgttccaccctctccttaccctatagcagccccaccagtgcttccagaccctcgaatacaccaaactcccatgaccttggatcatgccgctccctcgctacccctcttccttttctttttttgttttgtttttaaagtttttattatttctcgagactgggtcttgatatgttgcctaggctggcctcgaactcctgggctccagcagtcctcctgcctcagccttctgagtaggctgggactacaggtgcatactgctgtgcccagcttcttttctgttctttggttctcaacagaagtgtgctgtccatgacaagccttccttgaccaccccatctgtggcatcccccacttccgttgcctttttcctgccttcatagctttcatcaatctttatttgcttatgtaaagataaccaataattataataatgactcacatctactgagtgcttaccacttgccagcgttgtgctaaatgctttacctttacgagcactgcaggacatagacactagatttgttgtagtgcataatcctctttttgtttaaacaatttttcaaatatattacaattgttttatctaaattgaattggccttttaatccttgtttcaagatattaaagttagtttatgcagatgtaacactttttttatagcaatgtaaatggactaaaaatttttttaaaaagaatacttttaatactattgatgaaataataaacacattgatataattacattaataagcaaaacaggcgtgaacagacaggttgggaacacacacatgaccatttttccactgggaaaatgctcaattcacaagagcccagatgcctaggcacatgagacagtggtcagctggtcggcagtatcagcaggctgtgggcctttccttccttcctccccttccccttccccttcctcttccccttccccctccccttccccttcccccctcccctcctctcctctccccttccctcccctcccctttcctcctttcttccttacctttcctttccttttaccttaccttaccttaccttaatcttgctctgttgcccaggctggagtgcagtggtggcaatcacagctcactgcagccttgacctcttggcctcaagtgatccttctgtctcagcctcccgagtagctgggactgcaggtgcatgccaccatgcccagctagttttaaaatgttttgtagagacaaggtttcaccatgttgcctcggctgtctcacgctcctggcctcaagtgatccacctgccttggcctcccaaagtgctgggattacaggtgttagccaccatgcctggtctcttttttttttttttttttttttttttgagacagagtctcgctctgttgcccaggctagattgcagtggtgcgatctcagctcactgcaagctctgcctcctgggttcacgccattcacctgcctcagtctcctgagtagctgggactacaggcgcacgcccggctaatttttttgtatttttagtagagacggggtttcactgtgttagccaggatggtctcgatctcctgacctcgtgatccacccacctcggcctcccacagtgctgggattacaggcatgagccactgcacctggccttttttttttctttagagacagtcttgctctgtcacccaggctggagtgcagtggcattaattatagcttactgcagcctcgaactcctggcctcaagcaatcctcctgcctttccttcccaaagctatgaaattgcagacaggagccaccatgcctggctggtttttgggggccatggcaagtgcaggcttgtcagaggaattggagaagcagggattagttaggaaaacctctccacttcttgtgtttcatgccaggtagtgtttgtaacttcagaacccgcccttaccttacctacctaccatgttatgctcatttcacctactgtcccctgctgtatagggagtgccttgagggcagagatcatgttagttttgttccctcttctgtacagagggtggagcccagtacctggcacagctgaaggaggaatgtgctgctgctgtctctgtatttccaggtactccttgttgacctctagccaagacaaggaacctccttatgagatgtcatcttctgagctctcttgatggagggaataccacggtgatgattgaatatgaaaagtcttggcacagtggctcacacctgtaatcccaacactttgggtggccgaggtgggaggattgcttgaagccaggcattgagaccatccttggccaccaaacgagaccccatctctacaaaaaaagaaaaacaaaaccaaaaaaacatgaaaagtctcatccagggtatttcccactgggagttttactttcggcctgtgtttgtgtggaattggactgtgtgtgggaacatcccagctctcttcctcgtctgactagtcatccctggctttttgtctttgtttttagctaagtccctttttctttttggtgtggttagatgtggtcatctgtcagtgctctggcttggggtcttctcttgcctacatcttctttgctttggctgttgcctctctgcaggtgatggctacgtttctctctactgcctgaatatgttgccagaatgtcatagaaactgaacgtgtgcttgccatcctcacactagctgttcttaccacctgcccgacttccatagaaactcggggtggacatgcgccaggccctcaccaatgaccctgtccattctcataggtgccttcccctgttctcctaaatccatcgatgctaagtttgtacctcagtcctggttctgaaacctgtttctctatcatcataaagaaatcatggaacctctgtgtactttggtttacttttttggtgggtttaaggaagattctgtgacttcattggtgatgacatggcattgggagatagggtccatttctgattttcagagtgaggaagcaggcatgtgtgttactgttttagagaattgtggcacctaccctgttcttcagctcttggtacctggccttgtaatgaacacgaatgatctttaaaagaagttagattttaaaaataatatttttgtggctcacacttataatcccagtgctttgggaggcctaggcaggaggattgcttgagacaaggcatttgagaccaagctgggcaacatagggaaacccccatcactataaaaaaatgtttaaaaattacccaggcggtgcatacctgtagtcctagctactcaggaggctaaggtgggcgggtcacttaagccaggagttcgaggctgtagtgagctgtgatcatgccagtgcattccagcctgggcaattgagtgagacactgtttcaatacaaaagaaaaataaataaaaaataaataaataaataaataaataacatttcttttctttctttttgttttttttgagatgaagtctggctctgttgcccaggctggagtgcagtggcgtgttcttggctcactgcaatctccacctcctgggttcaagtgattttcctgcctcagcctcccgagtagctgggattacaggcacatgacaccacaccaggctaatttttgtgtttttagtaaagacagggtttcaccctgttggccaggctggtctcaaactcctgacctcaggtgatccacctcaggctcccaaagtgctgggattacaggcgtgagctaccgtgcctggacaaaataatatttctatcacaaaagtatgctgattttaggtgatttgaaaataaaaacaaaaagatgactaacatagtaaccaccactcactttttgtgagatttttttctagattttttttttctgcaacacatttatttaaggacataatgcattttaaataaatattgtatgttgaccatttcctttggcattaaatttcttgaaaaacacaattttcagcattgcttaatattctgtcatttatatttgaccattcatctattattaggaatccaggctatttctgtttcttccccaaataacacatgggtgaatacccttttacttctggatatcaggccagatagtacttacaagcaatttgcctgaaaacactgaatttggttatttaagaagcctgaacacatcctaaagatttttttatccgatacctgaggagggatgtcttacctctttcttagtttgtgcaggttgttattcattagtgaatgtttggaaaataacaaacaggtaatggtcaggaaggtgatgactaaagtttatgtgaatatggcatatcatttcaagaaagatgggttttttcccttaaactcaaagttatcaagagatcaacttctcaaactttggaccaagggcagttttgtgggggaaagcagtaacgtatgctatttgtggagtttagctagaattgatagatgcacctgatccctgtggagtagttgatatctctgtgtgggttgggtaacgctgctttatagtgaagcttttcttcttccaagtgcctctgagaggagagaaagtggttggagacccaccagtcctgcgttagagggccatttctccatcatccacggactaaatatgtgaccttgagcaaatcacttatcactgcattgggactcggtttcttatctggaaattaatcagcattaaatattttatggttctctgaatgtttctttgagagattttcactctctagttaatggtatcccatgatgaagttttttaaaattgttttttgttttatgaccatttcttaatttgagtttctctgtattgcaaaataggcattaagagaatagggacctttaatttttgttttatagaaattgtagtgtggttttctttttcaaatgcaagtgctgttaaattgctttcaggtgataatgtaggaacatcttataagtattctcagaaccctatagacatatgcacttaactctctaagcatgttttaaattacacaggacttttcttgttaagatatagatatgtacaaggcttaaattctagtagattacaaatcgtcgaaaataattttcatcttcagagagtaaattaatggagcagagtccatgtctgcttgaatgggccaatatcctcttcccagggcgttgtattgaataggtgcctaatgaatgcttcttaaataagcgaaaatgcaaagacatatttttaaatttaaaaaataagctttctccttccttatctttttccataaaaacaaaacaagatttaaaactcatgtatagaataacaagatcgttttatttgttgccactttccaaagattgccttcattttaattaaaatcctaagtgaaacaaaaatagagacactggccagatgtggcggctcacacctataatcccagcactcccgggggctgaggcaggaggattgcctgaatccaggagttcgagaccagcctggggaacatggtgaggctccatatctattaaaaaaaaaaaaaaaaagtacagacaccacaaaatgcagtacacctatataaattaaatgaataaatagcacacagtgctgaccttctgaaggggagtgtggtcataattttattattttatgaggtggtgacctaaaagaaagcatagggggtgtgtgtgtgtgtgtgtgtgtgtgtgtgtgtgtgtgtgtgtgtgtgtttggaggaggggtacctcttggaacatcaaagagtctgttgtcacctagacgtgtgcgtggtgaggcagggttgaatgaaggaaggaaggataaattattggggtggagtaggggttgtgctgagttggaaaggggatctaattcccaggaacttttcattatcatctgctaacaaagctaatggcaagatgtatacattataatgtatttataagtagttatcaagaatttcttttgtgtaaatgcccaagtactctggctgtgtcctttctgtcatccctaagctctggggccattttgtttacaggcaaggacctaagtgagccctgagaattgtgccttctcttctcttactgctcacgtatgcggtctctttcttgggcccatttttcaccactgttagttgacacagacgtctgcaggatcaaaggtagaagcagagacaccctggagcacagtcactttctctacattagccaaatgcagtcatgatgcctccacccaggtgtgggcctgggtctcaggtgctgagtggaattgagggtgcccgtcttggggaagtaatcaaaggcagcctcataccagggtgcacgacagcaccaggagcctttcacagtgtctagtgagcactgcagccaggtactcatactggtcagcagacctaccctcatggtccctgggcttacttactttgtcacctgtcacctgccaggtttcattttttgtcatcaaacccgattccaatgttgagtatttatttttttctttttaagaagaaaaatgcctggcaagcaattctgtacagatttttctttttcatgttatttcagcatatctaagacaaagctggaacggactcaggtgggaaattgacatgacagctcagctcacactccacctcccgtgatgggcccaggctactgtggttcagctgagttttggcgtgaatggaatacggggccgtttgagcttctggttcacttgtgttttgaggcctgtggcacctgctacgtgacttgctggacataggtgtgagatttcccatacagcctcccaggctggcaggaggcagactcagaaccatgcaggccgtgtactgatgctaccacacccaagccctttttcttctctctgtccttctcagaggtagggttgattttaatgagaactacatcgaggccaggatgcacgttggctcctcagtgctctgccaaatgccatctccctgcttttggatatgttctctaaaagccaagctttgttcccccaccttcccctggaggtgggttggtgcctgtgcctgaaatgaggaggagatggtttgggagggggtagttgacagcaagctgttcattagcagtctgccttctgccgtgggtgctcagtgactggcagcggcaacattttaaaaaataaagatcaggctgggcgcagtggctcatgcctgtaatcccagcattttgggaggctgaggcaggcggatcatgaggtcaggagatcgagaccattctggctcgatggtgaaaccccgtctctactaaaaatacaaaaattagccacgcgtggtggcacatgcctgtagtcccagctactcgggagggtgaggcaggagaattgcttgaacccgggaggtggaggttgcagtgagccgagatcgcaccgctgcactccagcctgggcgacagagtgagactccatctctgaataaatgaataaaataaagatcagaaagagaactctgcagaaagaagcaccctgctcagttaattttctgaagcaagtggaaggaagtcctgcttgtaaggctgtctttcatgtgagtcctatggccccctcaaggacggaaggttaggaagcctcttccgggtcttcctctcttctgccataggcttcttggctggcccggcatacaggtgccctgactaacagggaggaaagctctggagtctggaagcaggttccagaggggggttgggacctcggagggctctgtgtgctagcagtaaggtggagcactggggatgcataggaattgggaagttgttttgttcagatggccacatcggggcctgggcatgcctgtgctgatcacctgtgaggcatgggggaaggtgggatgcggcaatatctgtgaggtctgagacactcgggcaaactcataactgcatcatttatatactttattgctcaattgttagtgttcattcatctttttaatatattatataaattgaaatattcatatactcacccaactaataagtacaaacttagaaattttattaaattcttttaaacatttaaatttgattacaaatatgtttaattggatctgccttaacatcacagaccaaatctattagattctcttaaatgcttacaaaagagaacatgtagttctagtaatgacagcaaaactcctgatactcacacttaatataagcatcagtactgtgggtttaattcatttctttgtgaatttctgaatctgttttatatttttccagtgatctagtaatcttaatagatattaaagaaaatacgatctcagcagctgtgttagattcctagggctgccgtaacaaattaccacaaacttggtggcttaagacaatagaaatttattctctcacagttctggaggccagaggtccaaagtcaaggtgttggtactgttggttccttctggacactctgagggagaatctgttccctgcccctcttgcagtttctggtggctgccggccatcctcgacattgctaggtttgtggccgcatctctccaggttctgctctgtcttcacgttgccctctcctctgtgggcgttttctcctcttctcctctgaggacacttgtcattggatttagggcccacctcaatccaggatgatgtcatctcaagacttttaactgaattacaccagcagggccgggcacggtggctcatgcctgtaatcccagcactttgggaggccgaggcaagcagatcacttcaggtcaggagttcgagaccagcctggctaacatgacgaaaacctgtctctaccaaaaatacaaaaaattagccgggcatggtggcgcatgcctcccggctactcaggaggctgaggcaggggaatcgcttgaacctgggaagtggaggttgcagtgagctgagattgcgccactgcactccagcctgggtgacagagtgagactctgtcttaaaaaacaaaacaaaacaaaaaaagaagaaaatgaattacacctgcaaagaccttttttccaccttcacagcttccaggtggacattatctttggaggggccaccttcaacctgatgtcttttcctgaaattacagattatttatctttggcgacttgtggttgtgacctggtgtcccatccaaatgacacacttcacctggaacatgtttgaaaacatgtacgagttttgttagtgtcttactgttatcattagcagcttttattgagcttttattttctaggaatttggggccccagtgtgggcagtcagctctcctctggagccctctggccaatccgtcaccttacagccctggggctgatcctgctcctacccgagtatagtctgtgcccacagcatcagacctttctgttcttgatacttgcttcctccttccatgtagggttggcttattcagagccatcctacttagagacatatttgtacactgttttataaaaggtattagtggcagaaacagcagtcatacacatccacctctgctgcttcctaaaatggattaaaaataacttcctaatatattctcccttcctttatatatcagttgccctgttcacttggttgcccttttcattttgatagtcattgaagattcatggcctttacagactcaccttgtctcttctaaccgttattaactctgtactcttttggatattcaaattgtcacaacacagtgcatggtacgtgcatggtagtccttttaagatggcttttatataccttatcacttctacctcagaccttttgaagtggtctttgctttcttgaaacctggtgttgcaggtccctcttgatttttccctgcccgaagacttggaatcagccactctacaaggagccctgttaaggtctaacctaaatctgggcaccagaatgttgacttgctgctgatggattggagggctgtccttgttgagccacttgtgtgacagagctggaaagagttgttttgtttgtttgtttttaatatcatgaagttacatagatattttcagtttaactctcactttcctgatcatttattttgttctttaaaaaaaaaaaacttctcaatttgttttctctgtgaggtgctaacttgaatctttatcttctttaattgtacctcttcttttttttttttttctttcaaattccattagcaaataatccttggatgctttttcattcacttattgagaagtggaaaaggcttaggacggggatcattcctggtttatatccagatgcttttggtattctctgtgcaatcctgggcaagtgacttaagccactaagacccctttccttgtctccacaatgagggagccattaggtcgcaggggtctgaggagtaagtgagatataaagtattaaatgccaggtatacagtcagcactttctaaatggggcagccgaagatgcggtgactaaggaatggctgaccagtggctgtgaggcttacccgagacggctcctgggacctgtttttattcctgactttctagtggcagtgatggaggagtgtcaggtcatggtagggaggaggctgctttttcggctgcagtaaacctgggccgagggagggctgtaaccctcaggagtgttgggactcttggtgtgaaggaaagtggatttgatgtcagatagacttggattttaattgtgaaactcttcacagagctatggacagattactttgtctttccaagcatatgaaatacttttggtgtagttcactttgaaattgcttgaagctcgtaaaaatcacccctaaatgatgctgtttcctttgtgcttatttatacattgttttgtttctttcctattttcttaaaaagtgaattggatatgtgcagctttggacttaattcaagctgtgctcaataatgtgttgtcactgtttagaaatggtgcctcgctccctacctcaccccacctgtcactcctgctcattactgtgaactcagtgcctttgaatcagttatgttggaaaaagcttataaatggcatttctacctcatttccctaattgtagcttaggaatttgtaccccctttttaattgttcatttcctggcttatttcccttaaaaaaaaaaagaaagattagagtgatgaagatgatcacaactaacatttattgcaaactctctttgtcccaggcactgtgctaagtgctctgccatacactaattgattatagcttcccctgtctctgtggaatgtattataatcacccccatttagcagatgagactgatgttatctaataaggtcacagacatggaaaacaaagagcctgtaccaaacctcagaccatctgactccaaaagcccatgctcttaactatgaaatctgttattttttacttgttttatggtaatggggtaggaataaaatgttaaaaaaattcatagtgctgtaaggtaaatgtgccaagtattatttaaggggtttctatcaaaacaaaaaagcaagcaaataagggatttgtatccttgtatatttttttttaactttaacaaaatttattcttataatttgagaatatattgttccatataaattgtattatttcattaaaatgtatttgtttcttgtttctgttacatataaaattgtactggagaaaacatttgcaaagagatggctaggatttcagtaaaagacaaaggtttatagtgaaagctaatcttttatatagctcttgggattagttgaaccctgctgaagtattacatttcttcaattattctaaatttcatagaatgtcagtttttctatgtctattatatttaagtaatattcattgcattgttcttttattttttaattatacaagtaatacatgcggattgattggtaaaaagtcttgcagtctgtaagcaagacacacagtcataatcttccacctcctcgcctccccaaaggagctactttaacattttagtatctattttcttctaaaaagatatatgcagttttgaaaattgaacaactgcctaattaagaatgggcaaagggagccaaccgtggtggcccacgcctgtaattccagcacttcgggaggccaaggtgggcagatcacttgaggtcaggagtttgagaccagcctggccaacatggtgagaccccatctctactaaaaatacaaaaaattagctgggtgtggtggcacacacctttaatcccagctacttgggaggccgaggcatgagaatcccttgaacctaaggtcagaggttgcagtgagccaagattgtgccactgcactccagcttggacaacagagtgagactctgtctcaaaaaaaaaaaaaaaacctatgtgcgtttttgaacaaagatctttgatatgatttgtaaacaataaaaaatttatgcattacattttcatgccttagcataattttcaattgctgaaactcaaaaacatgttgatgttacttgattttgtttacatctgatttacttttctgtaagtagatataacttttcaaaaatgtagtcaatttgccaactttcatgttgttcttcaaaaccatcaatcatctcaagacaatgaatattgcatattgtactgaacaacctttcaatttcagcatgtggaacataagctagtgggcctgcatgtttagttgggtcataagaaagaacacactcgaggtactgaaacccttttcccagtagggacaacattgtatctgcatagtgtttgaaatctcctagattaatggcagccagtgctcctctatcccaaattctgtcaaatttgtcgatatgtgtttggggaagataataaatgctgcaacagtacaatgaaatgttctctgaagaactcttaaatactttggcttcaggaactttgctaattggttcttctgagtaagaaagattctgctctgtaaaaaattcttgtatcccaagtgcactgatttatacaccaactacattgtgtccttggtctgcaaaccatttcatctcaacaaggaggaaaaaataccttcagtctactctcacctttaagaaaagtatccaaatgcgtcttcaatagctgatgtccttgttcttgatgaaaagcaatattgccgttcacccacttgtcttgccattcttccagagttcgtacttggttttcctgacctcagtattgggatacttttccatatcaaatgaagctcttgtatcatccatagtttcatagacaccattgtctcataaatgtatgttttttaatgcctttactggtttattacaaaggatactgtgaaggatacagatgaagaggctccaggaacctccatgtgttcagctattaggaagtttgtctgactttcatgtgatgctttgaggagtttgcatttcctgttcctttattttatttttttagtttttggggtaaggtctcactctgtcacccaggctgcagtgcagtggcatgatcacatctcactgcaactttgaagtcctgggctcaggtgatcctccagcttcagcctcccaagtagctgggtctacaggcatgtgctaccacgtctagctggttttaaaatttttttgtagagatgagatttggccatgttgtccaggttgttcttgaactcctggcctcaaactatccttccttcttggcctcccaaagtggtagaagtacaggcatgagccaatgcaaccagccctctggttcctttattaaatcattttgcaaattcttgttggaccttccccaccctaattggattgaactggcgaacattgctgattttttaggagtttgttgttaactatttgcctgtttataaggcccatcatcatctttttagaaataccttaaggtatctcagaaaacctcgggacaccggactccattcacctgtcttgaggtgaacatctgaggggctgtttgggagcttgcagtggggctcttgagaggcaccatcatggccagagataggacaatattaaagactagagggagagatgagatgtgtcagatagcaggggcagttataagaaaggaattaaaatcatttctgctgactttaaatagtcacaagtcctagaaaactgaaaatgtatattcaagttgggatcagggagagggaataaagtaagtgagggaggctatgggatctgatatatactttgaccagaaagaatgtgcagtttggttgggagtgtcttggaggaggaagagatgatgacagaggggcacaggtcctccagggtgtaagtggtagccaggagacagcagggccagggatggtgtcattcccttgtctcctacattttctgaacttttctggaatcctattaacaattttagccaaaattcatcatcagcatcagtggttccactgcagcatgcggggatggtttctttgtctgcttgtggtttgggcccctgcctttaacttctcttttccctccgggacttgaggctctgttatccatagtgagtgccaaagggttggatccttgcagtccacaagaggacaggacctgctctcactaaaggctgggccaaatggggttggccagccacctggcaagtgggaaggtctgatgtggtatcctgcccaggtgtgcaagcaaggcccaatgataagggccagacatggctgtaacatgaggagagggtaccccagagcagagagagatttctttgaggacctcacaacacaacgttacaggctcttcagcttccagtgatttaggaagattgagatggatcgatacaaagtatggattccatctaagattctctatataagatgtgtgtgtctatgtgattttcctttaaatttctattttacacacagaagcagacatacacatacatagaaacacacacacacacacacacacactattatctgtatatatgctgctgttgacaccaacagatacttacagtacctggccaagaggacaatgaagtaaataagtagttttggtttagggcaaggttctcaaccaagcagttttatatccaggggacatttggcaatgtctggagacatttttggttgtcacatcttgggggtggagggtagtgctacctgcgtttagtgggtaggcaccagggttgctgttaaacatcctgcgatgcccagaatagccttccacagcaagaattacctaacctcaaatgtcaatagtgctgaggttgagagaccctgctttagggaatgaaattcaacctataggatagcctagaatctgtcttattatccactaccttgttttattatgaatatttcaaacatatcaaacatttagaactaatattaactgtattttttaaggaaataaaacatatgggtgcatttataaggaaagttttaaaacctcatttcctcactccttccccagaggcaactaacttcctgcaggtggacttttttcttctagtgtgcactttaacgccttgattacacatgtacgtgtccatgaaacagcatattgtactgcacaagccctttgtgatggcgccctcctctatttgtatgtgacaggctgtttttctagaagtttgagcaaaagcatgagcagagaatagtagtgcatctaagtgaaaatgtttccattttctaagtaatttacatttcctttaagtggtggtcaaaaattatagaagatgtttaatgtgtgaaatcaggttgaggaaaggaaaccaaaagtaatgatttgcagattttaaaaggtggcagatttcaaatccagagtcttctttctatcgtgacccaaagtagggtgaataagcttgtccttacgtttcttgaaggtgatgatggtgctgacccctctgtctctcccttgcctgtaccctttcttttccctgcctggcatctctcagcctctgctgccagcatccttggaagacatttcctccatctctgcatcatttttcagagccggccagtttctatggcaacggttagattgaaagatgagcggcgagcaggagacgaggcttgagtgagacagccagtggtggtgtgtgtctctgacgtcaccctctaggcgtctggataggacgatcctggctactcccattcagggctgctgtccagtgctgctttattggcagtgctgccagggtctccgttagctctctgcaaattgccttcctttctgctcctcctactccctccttcccccatagaatttttcttttcattgcccactttactgttttggctccagactgtcgttaagaatgtacagcctaattctggtgtgtttcgggatattcttctgtccagtattctggaagggcggggaggcatggcagcgttttacttgacgttgatggtgctgtgaagtccattctttcctctgcaagactactgactatgcagaaatttatcgaagcggattattatgaactagactggtattatgaagaatgctcggatggtaattatggcccctgcaaaacagagccgggatgtataggggtattgtctccttctgggtggggggtgtcctgaaacctttaggggagacaggcggctggcgggtgggaggtaccagaactagcaccactggctctggcaattccaaaggcatggtggaggaggtggcaggtgggcagggctctttaccgtgaaagactcctgcagtatgtatgattgtttgcttagaaggggagatggtttttggtgtgctgggcttgtaagtgttatacttctattggattgaattttctctggtgtgagacgtgagtgtgttgttgatgcatgaatgtgtgcaagtggaaatgtgttcactgcgctcttgctgttggaggggataggaaactgggggcttggaatagtgtgttcaggaggtggcttcctggactgtcagcagcaggcctggaagactctgcccttttctgagcccagacctgggaaccatcagaggctggagaaaaggcagaagcagcttaccacttagcgggtgattcaaatgaagtttgcttgttggatccaacagagatgggggtggggaggtgatgggaggggcagggaaagaatgtgtccttctgtcactaccttggtttgtgcagggagggtgtggcacattccaagggagactgggtggaggccaagttgtgtggctggacaggtctcaggaggtttcaagcacacagaaaacagcactgaggtgcgttctcagagacatcacagtgggcggggtctcaggttcctggggtgttggacatcaaaattgtgtattacacagttaatctgtctttaattttgtcttgaaagtgaccctcatatcacatgccttcacaaaaaaggggcccaattaatatatacactttgagggtctgttccccagtgatgatatgttcccagccctatatgagccattaatagataaggtaagtgctttttaattgagtcgggagtttcagaatgctctattcctgactacatttgattaacctgaatgatgtaacaggctgggacctggcctagttagtaaactgaaaaactacataattatctcttatccactgatttttgccgcgactgtgggttaaggctttctcaggggatggtatttaaatgtgtggaaaaactatgccagttcaatctcactggcccccagctttagatgcagacattgtcatgttcgttctgtgtacatctttaactattttgagtaacaaggattggaggcagttcccagggtcatgaggggaaaagatgagtgaattttttctttggaatatattcattctaaaagcaagttcccattctgttacctaactccaaaaggaaattctagagatgctcctttttggaaaccatcattgacctccttctagtttccttggtgatttgtgactcattgaaccctctataactttttaaagtaagggattgaatacatcctcactgtaccattggattagggagcactggttacagcagggtgctgtcagaggccccgtggattagtcaggtggggccatagctctgtggatgccatcctagaagtggaggaagaaggtttcctaataccatgacccaaatgccacaccatccagttccctttacaccctgaaataaagccagtcgcttgccatggtcaatctggagggtgagcggaggcctgctcttatctgggtatccatcagaaggattttcttacccagcacttcctcagttgagtcttttggccctgagagaccctgatctgtcttcctctaagagcaaaggaaaatagaagaggagatggctcaactgttcaagggtaaatatattgatttatttatttctgaattattgttattgtctgaatgtatgttgagcaaaatacttgtcctttatcatctatcccattttggatgaagggaagaaggtttttgagacagaatttactgggaccactggtattttcatactcccatttaaagaggtagcaaagtagggaataaaggaacagaagtccagaaataaactggtttaggaaacgtacaaaaaggagatttcaattatgtgccaattttgtggttacttgcttacacatttctaactagttgagttccttcctagcttcaggcagattagtctggaaatgaaatttgcccctgtttatatgtacctgtcttttatttgcctctgtcttttttattgcaactcaatagacacacaccattgctttgtctctgattatttggcatttgaatcgtcaatgagggaagcttttacagaacttttgatactaataaaaggtgagtcaaatgttttaaaaaagatgcagaatcatcatttatgtcagagctactgactcacacttaaattgcagtgttagcactgaaaaagaaatgtatatggatgggaatatagattgcaggccaattaggacccctcttttgaagttggaattaagggatagctactgttctcttctatctttgagggttaggagaactttattcagtgttgaataactgtattcctcctgtttattaatgtttgttgtgggggtcttctattcagcacccatctctgcctgtcctgctcccccgcccccagaggaggatataataagaggcatgggacaggggcttataataataagacatgggaggggttgattacccagtgtcttcaagtaacttttacgagagatttgaaatagccagcgatcaatgcaaaatagcaatggccttggcagaatttgcacatacatactcaatgtttacagtttaaactctggtgtcagacagggtcatagttaccccgattggatgcatcccatctctggtgcagaacctctaaaacttgggaaatcattgaaagtcatctgcttattaaaaaagcagattctcagactcacatcagactaggagaagtcctgagaaatctaaatttttagcacatgctttgggggattctttacatcacgtgtgtttgggaaactgtgctgattgatgtccatggaaagcagcctcaggcatggggaggggctggaaaagaattatttaggtcagtttcgggatcttagattgtttcttggctacactggccactttttaaagtgtgcttagaaagagtatgacacctttttaattttcaaaaggacttgggttcagtgtatgtccttatgttaaagaaacagccctctttgtagttactctagaaataggtagaatggcagaaagagcgctggctgtctgtgtttgaggcctgttttgtacttcatgtggccatgtggtatgggaacatcctgggatttctgtgagcctctgtgaactcagattccccatctggaaaacaggagtaacaacactggttggaacctttatggagtgtaaataaagtgatagctctttgtaagcgacgaagagccaggtcagtgtttaattttattttctcagaaatagtactagttattaaggcctttaacaaaaaaaaatctttgaaaaggctaatgggggcctggtatagtgtgtcatgcctgtaagcccagcattttggcaggctaaaggggggaggatcacttgaggccaggagtttgagagcagcgtgggtaacatggtgacatcctgtctgtacaaaaaataaaaacattagctgaatgtggtggcatgcgcctatagtcccagctactcggaagctgaggtgggaagattgtttgagcccaggagggtgagggaagctataattatgccactgtactccagcctgggcgacagagtgagatcctgtcttaaaaaaaataaaaaaaaaaggaatggtattttgaacaaggtacagcattttgaccacctgtttgttgcttcagtttcttttgtaatcagacttgctctccatccccgctcacctcccccttttataacctgatagatttgaatgttggggtaggaggtggtctagttcatactgatttcacaaatgaagaaactcgggtagattgtcgcagaagttattcttacagcttcttactctataatgaagatttatggtatacgcaagggcagtctggtgcgctctgttcctcacttgatttcagtgatctctgaaatgtcacccaagatggcggtggctggttcgtgagtgttttttttctttttgtgcgtgagtgaagttttgttagaggtattttaagcattaattgaaaagctgcatttctgaactgagttttcgaattttcctacgtgttgacgcaaacagatccccatttctttgtcttgtgttttattgtgtgatgcgcccgtgaaggtagaggttgacttctctctttccacacacagcactctcctctgtggttattaaggggattaaaaaaagaaaaagaatgaaatgtaaacagttttataatgtaactgtttttattatcactggctatagtaaaatagagataatgtcctctctgacataggagctgaggactagagacttggcaagaaagccaaagcaagcctggaacccaagtttttggagctttgtggtgctcttgtttatttaattttaattttgttttatttatttatttctttttttttgagatggagtcttgctgtgtcatccaggctggagtgcagtggcacgatctcagctcactgcaatgtctgcctcccaagttcaagcgattctcctgcctcaacctcctgagtagttaggattacaggtgtccatcaccatgcctggcttatttttgtgtttttagtagagatggagtttcaccatgttggccaggctggtctcgaactcctgatctcaggtggtctgcttgccttggcctcccaaagtgctgggattacaggcgtgaaccactgcacccagccttatttatttatttatttatttagaggcaaggtcttcttcttgtcacccaggcgggagtgcagtggcatgatcaagactcattgcagccttgacctcctgggctcaagtgatcctcctgcctcattttttaatttttttgtagagatggggtctcactatgttgcccaagctggtcttgaactcctaggctcaagtgatcctcctgtctcagcctctcaaagtgctgggattacaggtgtgagcctctttgcccagccttatttgtttatttaaattgtatgagcaaggtctttggggacatgaccctcagtcgtgccaaccctgctctctaggagcagagaagtgaaatgtgagtgaggaacattgagcatcaatgggacaggtgaagtggagagaaagatgctcatacctgaaggagatggggagcagtgctgaaccagaccttgaaagataggaggatatgggctagggaggtggggacgttgagggtatagcagaggaaaaactttatgcctctaccctgcttgattcagtagctaggtgccctgagaaacaaactgataaaaaacattaacaagagaaaaatcagttttaattatgtaagtaggcactggcaatcacaaagaaataagagtcaaagaggcaagtagaatttggcgggttctgtgtcatcccaaagggcaacaaagtatggagaaaaggtgagacaaaggaaaacgggtttgggattcctgctggggagtaagttatgggaaggcaacttggaaacgtgggatactcaagacatgtttaataaggtgtgcagattcaagtgggtgccttgtccatagataagagattgtacaggagacggagacacccttccaaatgtaaatttctttacaaaaggaaaatttatgctccgtttttagagcttttccggcatctgctgttcttcagttgcttctgctcaaaataatccttatgtcaaagaggcatattttgtttgtaggggtgggagtctggtccccttcataggtgagctaaggcagtagcattatgtgggcagaagttagcagcttgttttgtctgtttgaggtgtggtgggaagccaggctggaagcagaggctgcaggggagatgcaggatgtggaagccaagaaaatatagagctcccatcttgaaaataaggggcaccctttagatcagtgctatccagtgaagctttttgtaatgcagtaaatgttctattctctgctgtcaaatacggtagccactggtcacatatggctgtggagcacttgagatatggctagtgtgactggtttttaaactttaattttaatccatttaaatgtaaacataaatagtcccagtggcttgtggccactctttggacaacacagggtagagctttgggaagatgacttctatggagtatgtcaagtagatgtgagcaggagacagagaatgatgtgcctccgccctgcaagaggtgattgaccctcccctccactggtcttcctgtccagtgttcctggagatggatcaggaactcactctctgcttccctgctgtgggtcccagtgtctagtctgtgcctttgatacggcacacacatctgttacttaactgcctttcacacctccagctccaggctccatgtccagcctggcccagccctctccatcccttggttggcacagggattcccaggctttcttgccggtctttgggggttgtgttttgctttgacttttggagaaactacactctcagggaagatgccctttggcccatctctgcctttaaccgtgaagtgaaggcagatgtgcatgagttttcagaattctctcacacccttgcagcaggaggggaggaaagaagagattgggagagggatatcgtgaagagtgtctaaacccagagaaatggggtgacatgaagagtctagggtggtcctgtgttcaaaatttcatgtcttacacagcagccagcccgaaggggctcccactggcctaatatggggcaatttgaacatcaaaataaataatagtagtcaaggattatgacttatagaataaaggaagaatccgtgagtctatactgataaaaataaatgaatgactaaataacgggagggaagaaaaagttattacaataaaaagccaactaataagtgttggaatgatggaattagaaattagaaattcaccactttcccatccatccacataaatgactaagacaagacttattaaaactggtggtctcaaagtatatcaccatgaaatatatcaccatgaaacactgttgaataacaaagggaaaaataatagcttcacagtgaggaaaccaaatgatcaaagtaaacattgggctttaaaaactggagctttaaaaattaccgatgggggccgggttctgtggctcatgcccgttcataatcccaacactttgggaggccgaggcgagtggatcagttgaggtcaggagtttgagaccagcttgactaacatggtgaaaccccatctttactaaaaatacaaaattagccaggcgtggtggcgggcgcctgtaatccagttacttgggaggctgaggcaggagaatagtttgaacccaggaggcggaggttgcagcaagcagagatcgcaccactgcactccagcctgggagagagagtgagactctgtctggaaaaaaaaaaaaaattactgatgggaccaggcatggtggctcacacctgtaatcccagcactttgggaggctgaagtgggtggattgcttgagcccaggagtttgagaccagcctggacaacatagtgagaccctgtctctacaaaaaataaaaaaattagcgaggcatggtggcatgtgcctgtggtgccaactacttaggaggctgaggcgggaagatcccttgagcctagaggtcgaggctgcagtgagccatgatcatactactgcagtccagcctgggcaacagaatgagaccctgtctcaaaaaaaaaaaaaaaaaaaaaaaaaaaaaaaaggttaacattggcagtagtgggaccgctccacagcagacgcctcctgagaagatgcactgaagagaaagtaacaccacttctgtgttttcttgccgaaagttcataaacagaatctaatcataagaaaacaccaggaatacccaaagtgagggaccttctacaaaatagttggcctgtattgttcaaaaaatctgttttgaaatatgaagactcagaaattgttccagattaaagaagactcaagagacctggccgttgaataaaacacatgatcttggatttcttttgccataaaggatgttattgggacaactgaagggaatctcaataagatctatgggttacaaaatagtagtgtttcagtgttgagaaagagaaagtaaatgtagtaaatgttaccatttggggaatctttttgtactatccaggagttttctgtcctattcttgtaacttttctgtaaatctgaactgtgtaccccccaaaaacaaaatattcattgttcatttctgatggaggcataccggcattcactgtagtgttctttattctgtatattttaaatatttttataattaaaggttggggaaaagtaatgaagtcatgttctaaatattgtgtaatatatagagtcttggacatcatttagaatatctaagtctctgtatgtttcataatagcgatactctagatttgaattaaaagatgagtataaataaatttattatgagtaaagtcacttgatagtatttttgaattggtgaaattagcttttgttttcctttatatacactgtggccggcacaatatcctactcatcttatcgtcaatctgatacttgctgaatgaatcacgcacaaggtggaggttcttcctctctcctgccttctcaggggttcagaataaccatttgtgtcattcacaacaccttatagatgtgcccactgtcatctgaattgaattagtctaatccgataaagcttattaatattaaataagtattttttgagtgtgtttatatttaaagcttatgcagtatttcaaaatggaatgttgaactccctgcctgaatttctacacctttttttttttttttttttttggctaagaacacatctttaacatggtaaaatacagctctaattttcaagttctaaaaaattaaccagaggtctgggcgtggtggttcacgcctgtaatcccagcactttgggaggctgaggcatgcggatcatgaggtcaggagattgagaccatcctggtgaacacggtgaaaccccgtctccacaaaaaatacaaaaaaaaaaaaaaaaaaaaaattagccaggtgtggtggcaggtacctgtagtcccagctactcgggagactgaggcaggagaatggtgtgaacccgggaggcggagcttgcagtgagccgagatcgtgccactgcactccagcctgggcgacaaagcaagactctgtctcaaaaataataataataataataataataataataataataataattagaggatgcatatgtccttagacttttaaataaaatctttattatctctggttttctatttagaggcacttgtacatgatgtcatattagtctttatggaggtagtaattcaatttagctgacatttttagccacctgagcagaattctcggccctaaggattcaaagacgaatgagatatggttcccgaacttgtgtagaaaattgttttatgaagaccttgcccctgctaaaatctctcttggctacctgggggaggcagcctgttcgggaggttggaatgagtgtcctggtgtagctgttaggagcaggagacctgcacagtgtagctgggagatggctgaagcacagagattacagaatgagctgtgattctccgagacgctagcacccggggctgcctttcactgggtttgatggaagaacctgccgttctcactgttgcaggcaaaatcaaatggtatagaggaattgatatcaaggtgtgcaattaaactgtggcttctttctgcaggcaactttgcaagctattaggctttagatttttttcttaccttgttctagcaattagagagatctttataaatttggctgtggaaacacagatttagggtaagagcaggattttatgaaatgtagattgataaagagaaaatggaggttattatcaaagaaggactgggatgaattaagtttaacgaggtaatggtcactgcatttttttcccttttgctagaaattagaatgatcccttccttcctctgctcagcgctgtcaggcagttgtcacagtcagatttgtctccacatcttaagcccgcccacaggaagtctctcatctgggggtgttgggcagtgcttcagcaggacaattcctccgccagcgccccacctttaaacaggtgtgcctgctcaaggcttagttgatgttgccccatgcagttgctgtgagacttctaggaagctaccactcctcattgctgctgggggaggaaaggtggagagggtctaggaggccgagagcttgctgagatcctgtaccttcctgcagggctttcctctgaatctcctgcgcctagcagggcattcccaccccgccaagtgctccaccccaccccgcccctcctccaggctcataggagccacccccttccgggtcctgcccgggtgatgctgggccaggagctttgtgtacacccctccacttcagctgagccagggcatgtctgcggcccaggccagggcgcagtgtgtgccctgggggcccaggcctgcatggctcctctgggtagggggtcgggggcacccccaaggatggtcccttagggtgatgttttggctttggggtgacttcagcaatgtccctgcgagacaagggcggggaagaagaatgttttgaatacgactgccaggatgaagagaggaagccaacccacaggcagcatgacacccaggacctcttggaagagggtaaattctgtacttggctcagatttgatcctttccttgttagtatctaaataggcttgaatgttttgctgatttcatagcactgttttgtttttgtttttttttaagttgaggtataagttagagatcttatgcaaatggcttaaaggtgtccttgtaagagcccccaccccctcacccagagaacagcatttccagctcctcaggaagtcccttggtccctttctagtttacatctaccttcccagaaacaattattatgacttctgtcaccttagatttgttttgccacttcccgatctttgtaatggaatcaaacagggtgtattcctttgtgtctggcttttgttgcttaactgaggtctttgaaattcatccttgttgttgctaatatcactaatttttttttgtgcatggcattccagcattctgttttaagagattcagttgttatcttgtgactggttgggttttgataagttaatggacaagagaccagtcttattaaatgaagcatgtttttgttctggcagtgtttatttttaaaaaaattattaatcacttatctgaaataaagattttttaaatcttagaaatatttcaaaatgaatagcccaaggctgacattgaaatctgggagcccactgccggctctcttaaagagatgctcctttgcagggaaaagggaggatgttaggtaaagataggcccagatgctggtatgagctttctagttggccttccagggctttcacccacagcccagagaaaggagctttgggggctgatcaggatgtttaaacaatgactaatgttctttaggtcccttgagtaaaaacaatcagaatatgtttcaaacttctgctttaggatggtctattttcctgtcttgggataacttttttcttttttcttttttttgggacggggtctcactctgttgcccaggctgcggtgcagcagtgttatcctggctcacggcagccttgaccttctgggctcaagcgatcctcccacctcagcctccctagtagtgagtagcagggcccacaggcacacaccaacttgcccagctaatttttaaaattttttggtagagacaggatctcactaagttgcccaggctggaacttttgttttcaacattatttataatcagccatatactgaaagtatttttcttttgaagttactgttctaaaaatatggttaacacttcccctccaggacagctgcaaatattttattgcaggaagggaagaaactgggagaagccaggggagggtgagggacccaatgctgaggcctgcattctggctggtgcctttctggccttgtcttgaaggagatgggggaggggagaggagtgacgggattgaggatttgttaggtccctggaagggatcaggagaaaggtatccatctgcccttgtagaactagggctcccccagatttagctggattagcttcctgcccctttaatctctgctgcttcaagtgcagccagtgccctcatcacctgtgagcttgctagaaatgcagaaccttaggccccagcccagacccactgagtcagcatctgccttgtaacaagatgtccagatgatgggcacgcatgttaaagtatgagatgagctgctgccttaaagcctagcaagattttaaaaataccagtcattgaactgtatgattctagattaaaggctataaaatattctggagcagtatcatatatcctagtcaagagaggaaaaaaatttgtgttgtgcccatttcatgtatataatgtatataaatatgtgctgatatataaacatataaatatatattatatataaatatatgacgagagagagaccctctctttctctctctcattatatattttgtcaactaagtgaaataacaggcactagaacttagagaaatcacagtttattctgatccaggcttgaggacttgagcccaggaacacaggctcagtatagaccgagaatgtgtcctgaagtagacggcttgagacaccatagataatgcattttctaatagggggatacgtgtgacacagaaggtgggggaagaggatagtgaagcaacagttcctttcctgtaattctgtttggtgcacagcgatgctgtacataaggtaaatatgcagttgagcagtagggagaaagtttaggtatcttaggggtctggtggagggtgactgattttgtcaatcctgccttttgttctacatctgataaacaggtttctgaccagttcctgtcagcaaaatatttgacaaactctggttatacaggcaagaggtcagctttagtttataggcctaggtcttattaccctcgtgctcatctgcagccatcaggggccactgttaaatttttcgttagaaattttcttttcctgaaaatttatgtagatacatgtattaaacttttttaaaaaaccaagagccagatgatgatgatagtgaatgtcattatgcacttcctaagtacttggcaccattttcagtgatgttaaatctctgctgcttcaagtgcagccagtgcctttatgtggattcatgcattgaacctttaaaacattcgaggtcaaatactgttattattcccattttataggtttatgggaggaaatgtgaacaacttgtctaaagtcacacagtgagttaagtggtcccagcctatttagaatggctgtagaactctctgctcttaactatgatgctagcagttctcaaagtggggtccctgaccagcagcatcaggatcacctaggaacttgttagaaatgcaccttcttggaggccaggcatggtggctcacacctgtaatcccagcactttgggaggctgaggcgggtggatcatgaggtcaggagttcaagaccagcctggccaagatggtgaacccctgtctctactaaaaatgcaaaaattagctgggcatggtggcgggcgcctgtagtcccagctactcgggaggctgaggcagggaattgcttgaacctgggaggcggagcttgcagtgagccaagatcgcgccactgcactccagcctgggcggcagagcgagactccatctcaaagaaaaaaaaaaaaaaaggcatggaccttcttgggtcccactccagacctactgaatcagaaactggggtgggaccaagcaagctgggttttaacacgccctctgggtgattccaatgcacattgtcctgtgctaatccacacctcatagataacagtgtatctgccttataatcggattcaagggaagagattttgccttgtatttgtcatcttatgatagataattactgtctgttctctccttctcttgtttgtttctatccagttttccctcatactccaagaaatcatttttagcagtcctgtaggtgaggtgttaacagtatttttaggacagtaacctcgaaagaaaaacacttgccaacatgcttcatttactttgtaaaatgaaacaaactcacttttaaggtttgctcctgacatgaaagaagcaaggctgtggtgcagatcagaaagatagcaacttagaaagtttggtgtcatggccagttttgctggaaacacgtgtatctcagagcaagctgggcaggaccccatttttctctgtcatgatcacaccacctttgtcctgagttcacaggaagccagtcccatgtggagcagaaatactctgtgagtagtgaaaatatgtgtgtggatttggatctaaccgtgttacctggatttcaaggtgtttctacattgtcaacttgcctaaaagaggtgcttttggttgaaatctgtaagatacaattagtatttcagttgctctgatagttacagatacaggatacatttgttgttctctccaggtcaccttatgggataataggcactttctcatgtcactcatttaatctttaaaacaaactttcaggtaaacattctcattttgcaagcaaagcacctgaggctcagatagtttgcacttgtgtagagtccctcagctcgaagcacagagctgggtctttgccctgccttgtggggttctgtgtttcaccatgcccaggctctaagctgacagagttctaggcccttcccttgtattatctcattgaatcctcttatcccatgaggtgggtgctcctgggagaccaggcagcaggagagggcttggctctcactgtctttccagggagaggaaatatccaggccctgggtcttctggctcctgaaaacttgcacaatgagaaagcaaaattgatctcaggtgcttagtgacatatttagaggagggctcttctgcttttcgcaatccctctcctcactatgagattaagagggctgaactgcatgaatgaaatagtgggtcccgccctgtctcagtgcctgggcagctgcatgaggaaaacactggtgaaaagagaagtttcatggtcacttccttgtggcctattacctggcaaatttccagtgttctttttcttttttctttttcttaaatgaaatgcatcaagaagcctgactttgtaatttcttctcatcaggttacttccaatcctattacccatttgcaaagtgaatcactaaatttctggcaaatggtattcaggattgctcaggagaaggcatgatttggatagagatgcacaatggtctggagtttgctgagtgttctcatgaccaggtttaggttccccgagaacacgggctgcaggagagagaatgcattccactttccttaggggtggttgctaagagtatgtgagtgggcagagtcagtcttctgcacaaagggcagttttgaggtgttgaacactaaccagacatgatcatctggaaaaacgggtgaaaaaaatgccagtcagtggtgggaacccagagccttctgtgtctatgtccagtggctgcacctgctggctgttcaaattctccatctggttcccaggcgaagctggagattcagcacagatggagcacatttctccagcttgggagagcattcctgggctgcagagaaaggactgggccctgtgggggaataactggatccaggagtgccgtgtcttggaggtggttgtgatgcgtcaggcttttgtgggctgtggagttgggaatgtcagccccagagaaggggcctgagtcctgggcctttgttaatgtagtgtcatcggcagcactcgagggtgccgtgcacaactttcccgatgggtcagtgtcgaaggaggaactgacctggcgcatcagtacctaccgcagcactgttacaaaggtctcttggttcatggttttcattgtccttgtctccgcttgggatttggtcctcagtatccatggctaccccacgcaggcctcctgtggggtcagtctctctgggtggttctcctaatagtggggtaccagcatcaccccaaggctggccatggacaaagagcctactcacgttctctgtattttggggtccttttgccactctgcccatttctggggcctgtcccgtgtccctctgccatccccagctttcttgtatcatctgagctgcctagcagtgtctcttacctgacacctttcctgcttgctcctctgtgttatgccagtttatgcatgtgccctaccttctcaactaggtcaggaattcctcgagggtacgattcatttatttacttagcagacattgagagctccaacttaggggttagacagatcaggcccttccataatagctctgtgaccttgggcagtttctttctgtctaaaatgggacagtagtaatactttcctcataggatggatgtaaacgttaaaggaggtgacatacagacaactcttaacagagtgccaggctcatggtgagggtgccagagtgaaccatgtgtttattgccttattaaatgtcttggtgataaatggccactatagatcaacactgggtgttccagtctggggcagggtggctgattacagcatctagcaaacctgctccaagtccatggttgtgtctctctcgaccttggacgagccactggcctttctgtctggtttgttaaatgaggctcatatgtatgttgtgggcttcttctgagttttaagtgaaataatacttgtaaaatgcctaggaaagcagttggcacattgtagatacccagtagtagtatactcatttcatttattcttctctgcttcttaaataacttgtattggtgtcctgctcttagcctgcaaggcaagggaaagtgagccagtagaatagtcacactacaacttcattaatagtgatactgataagcaataaaaggaagccatagctgtgctgttttggcctctgtccttggcaagtggcaccatgctcctgcctcctagtgcagagactaggcaccacacagacatgggtaatggctgtacagaccattgttcgtacggctctgggtcggtctctgcccccactactgttccggccacaaggctgcctgcaaaaacaaagtgacacaaagaacaaggagatggggagttgctaagacagatgcattaaaaggatggcatcaattaagtggcgtagtcctaggccagaagcaaacgggcagactgctactgctcctcccaagtaagaggcgctggcttatcatgccccctcaggcctgtctggcgttcagatgacttgtggccgggatagactcaccaggactcatgctcatcttgagggcatgcactgtgcacccgagctttgtttttacccctctctggggtgtcgattagaaatgagctcttctttgcaagtagaacagagttttgttttgctttttgagtgtcaactgtggcccaaaatgagaaagactcagctgccttcatgtgacctaaacagcccaggtgggaagggacatttgtaagcatttgttgggtttgttctgcctgccctgctgtaaccatttttgacacgaggacactgagataagaataaaaagaaattgttctttctttttattgtaattgctgagaaatgagcattgttttctattaccaagtactgtgggccctcaccccgttccagtggccacttcaaagtcttcatcaaaatagctacattttgttttgtttttaaaaccaagtaatgggccaggcacggtggctcacgcctgtaatcccagcactttgggaggccgaggcgggtggatcacgaggtcaggagatcgagaccatcctggctaacatgatgaaaccctgtctctactaaaaatacaaaaaattagctgggcgtggtggtgggcacctgtggtcccagctactcgggaggctgaggcaggagaatggcatgaacccgtgaggcagagcttgcagtgagctgagatcacgccactgcactccagcctgggcgtcacagccgacactccatctcaaaaacaacagcaacaacaacaaaaaaaccaagtaatgtgtgtcttagggcttagtagttaattcactaggactatttggtcaagtctaaattactgagggtcaacaggcaagtgagagacttggcgaagccttcaaggaggtggctataacttgggagaagatagaagaggtttatgcctaggaaaagagttcaaagtcaaattcttctcagttatggctgtatcatgaaattatttctgtgatctgactaaattttatttaataacaattttctaattttaaaatagtctagtctaagtggggcagattagtacctttatgtgctgtttatcagtgctagtttcttagtgggtgatttgccatttctaaacaattttgctatgtgataacatcattgtggacccaaggaagtccaagtcaagggttgagacaatacaataatgtttttacattgtcatgtaacagggaagtggctggaatatggcatggttcggggatgcttgcttgagtgtcatttatttggtaacttaaatatcacccattttaactagacaattcaaagattttcgttaaattcactgagttgtgcaaccatcaccataattcagttttagaactttgcattcccccagcaaagatcctttgtgcttgtttacagttagctcccatttcccacttctgatccttggcaaccactaatctgctttctttttttttgagacagagtcttcactctgttacctaggctggagtgcagtggcacaatcttggctcactgcaacctccacctcctgggctcacccacctcagcctcctgggtagctaggactataggcatgccaccacatctggctaatgtttttattttttgtagagatggggatttgctatattgtccaggctggtctcaaactcttgggctcaagtgatctactttttaaaaattgttgttattttttgagatggagtctcactctgtcacccaggctggagtgcagtggcaggatctcagctcactgcaacctgtgcctcccaggttcaagcgattctcctgcgtcagcctcccaagtagctgcgattaaaggcatgtgccaccatgcccggctaatttttgtatttttagtagagatgaggtttcaccatgttggccacgctggtcttgaactcctgacgtcaggtgatctacccgccttggcctcccaaagtgctgggattacaggcatgagccatggtgcccagcaaagtgatctattttctttctttctttttttttttaagtgatctatctatctctataattttccttttcttatacattatatgaatggaatcatacaatatgtggtattttcgtgtgtttttttttctgagcataaggattttgggttcatactatagcatgcatgaacttcattcctttttatgactcaatattccattgtatggacatacctactgtgtttattcattcaccaattgatggacttttttggctataatgaatgatgctgctatgaatgcttatatacatatgtttatgtttgtgtgtgcatatatggttccatttatcttgagtagatacttaggagactttaaaaagtcttcgtgaccttaggcaattcacctgacttctcagagcctcagtttccctgtcatataaaatgtggtgatacagctactagggaggctgaggcaggagaatcacttgaacctgggaggcagaggttgcagtgagctgagatcgcgccattgcactccagcctgagcaacaagagcaaaactccatctcaaaaaaaaaaaaaaaagtggggataaaagtataagttactctcagcactgtatctggcagagataagtgggcattgctgctgtaagctgagtcacaacagccatttgaagatgttcccctgatcaaaagtgctttgccaaatcagcctggtctaggtgtctgggcagactgtaaaaactacagattttacaaaagtgggcagaagagctgacacttggatagggtgtcagctacagggaggcaccttctttttggcctgtgggaagagcaggaaattcccagatggagaagtgagagaaagacagtccgtacgagaaggaaatggcaggcacacaagtgcgaggccagacatctgagagtggcatcactgggtgtggaggagctatggtgaagagtgagcttgggtggcaggggacgaggcgggagggttgggctgggccaggtagggatggtccctgtatgtcctgtgtgttgaggctgctgcttgtaggaggtagaagagctggggaagattattaagcagagcagggactaattaagttcaaaagctacaagcttttaacaaacctttaaaggacatctattttgtaatgcctggaaacttggatgactggtgactcatttagaattttatggaaagctttttagttcccaggttctgggaccccaggttggctcccaggttctgaacctctgtcccctgcccctgtgaacagtgcagacagtaagtgcttattaagtttacttcctggggcatcaggtgccaaatgtagtattgctttttcatcctgacagctgctgctgctatcaaaagcgagaggtaatcaactggtttgtggaccattcttttctttggcacctaagtaccagctctgtttcaactgggtatatcagaattgctagggatacgtgtctactttgaatgtttattcaatccctttgcagtttttataatgaaaattatagaaaattgacttttaaaaacactgatgctaaggtgtagaagataggaggaaaaattattgaggggagggtggagctcagtttcttgataaaactttgggaaacactgttttaattaaagaaatgacctatatgtaaggcagaatgcaaacagccccaaatgcaaatatatcaggcagtcttgaatatctttttttttttttttttgagacagagtcttgctctgtcgcccaggctggagtgcagtggcatgatctcggcttactgcaagctccgcctcctgggttcacaccattctcctgcctcagcctccccagtggctgggactacaggtgcctgccaccacaccctgctaattttttttttgtatttttagtagagacgggatttcaccgtggtcttgatctcctgacctcatgatccgcctgcctcggcctcccaaagtgctgggattacaggcgtgagccaccgcgcgtggccctgaatatcttttctacccgttgctacttggtgtttgagttataagtgtcttcttgagggtttgggaggtttttctttttatatgtacacacatatgtacatgtgtgtgtaaaatattcatttattcatgccagagatatgtagagctgacatcaatgggaggaatgttaccagaattaggttaagtagtgatgagagttattcgttctaacaacgttatgagaatcttttcctccaaaatacatgaatgggaagtgaggttttctaactatattttcttaaagaagactgataagaccaaaatgtcaagaaagcttttatcaagcttgttaatttgacacacaccatagagacacagggtcccttggggagggcaggttgctgtgatggaactgtagagattctccctacccacccctcgggttaggcctctaggttctgccttctgcctgggtcttagatcttttgctccagccccaccactccctgagctctgctccttcccacttctcccggctcattcagaagccctggacagtgtcaagatagaaaccccaatgccacaccacctttgttttcttcccatggggttttcctcggggtcttcaattccagtcactcctgagcttcccactggccagatctccttggcatcaggcaggggcatgtttctgttctcttctgggcctgcacaccgtatgtttggggttttttggctggcatctcctggatgctggaagatgggtgccaacatttattcttaaaattgttttgagcatggtttaacttagcataaaggctgctttacttgttttcagactaaggcactccatggagctcactccacctccatcccccctctccgtccccattagctgtgacagcccagtcatatgtctccctctctctgatcagccagcccagggctcctcgtttgaatttggcttcgtaattccttactttacttggcatcccaagaagaaggacttgattctcctcttatctcaaagtggattctcccaaaccaaaaatctccctcctccagctcctaggagggtgtttctgtcaggcagacctcctgccactgtgggttgtgggcagccctctgcctggcacattattacacagtgacatcaactactgtcccagtgccagtggtttcttgggggcaccgcatcttgcctctgactttccatctcatgcccatcttgaaaggggacatcactcttgtccttgttgtcccagtgagaagccctgatcagtgctttttgatttacctcccactcagttttagttcttaaatctcaggataagagcccactccttgccacctacaatttccttgcattaatccaacagcctcaatgcttgtcaatctaaattgccttgcaccccctcccccattgctgcacactggagccaaaatgcttctgaaatataaaccttattgcataaccccccttcaaaaactctctagtggttttccatttaattccacccttcttaaagctacttgtcaggcttcgaaccccctgagccccatcctccaggctgccctgttttctgtgtgccccaggagggcaggtgtcctgccttgttcagtgcagagcttggtgcgtggtaatggttgtttggtgttagtcagaggtgaggcgtgtgtattttactatggtgggtaggcagcaagttgcatttaacttctttttctaggagatggaccataattttcttatattaaattatcatagagactgagcacggtgggtcatgcctgtaatgccagcactttgggaggccgaggcaggtggatcacctgaggtcaggagttcgagaccagcctggccaacctggtgaaaccccatctctactaaaaatacactaattagctgggcatagtggcaggcacctgtaatcccagctacttgggaggctgaggtgggagaatcgcttgaaccagggaggccgaggttgcagtgagccaagattgcgccatggtactccagcctgggcgacagagcgagactctgtctctaacaaaagaaaaaaaaattatcgtagaggtttatggtggctcctttattttgcttttctttcttttttgaaacatcttttgggtggaagtggatttatttggtagcactccttgggtcagaaatggaacttctctttgaaatacattcttatagagagagaaacttgaccacggttgattgaagatttagtgcctaggaagttggtatttgaaaagcataacctgtgtttatgctgtctgaaggcatggtttattattttttcaccttcattggtctcactcttgcttccttatttcttggaacaggaaatctaaaacctagaagttagttggtggctgctcagagccccttggcttggatagagtctcctgagaaaacctaagcctctgaacccaaggtcagggttctttctttcccctaggcccaaatgctgctcgctctgtttacacacttcctacacatcgatggtttgtgccttgctctcgtgtcctttatggtcttccgttttagtacaggagccagactggcctcggtgcagtctctgcaatgcagcctcattctctgtgacctcagtggggtccttaacatccagattcttaatgtctcagagcctcagttttcttatctgtggagtagtcatcgcgactaccctgcagggttgttgtgaagattaattgagaaagcatgttaaatcccttgacatgataggggcaccatcggtgttagctgctacctctaccgagagtctgttattttgacatttgccacctgctagctgtgtgacattgggtgagttattcagcgtctctgggccttagttttctgttgtaaaatggtgttaatataagtgcttaccccttatagtattgctctgaagattacataaaataatccatatagagggttatgaatggtgcctggccatggtcactgtgcttagtaaaggtcagctcactgcaacctccacctcccgggtccaagcaattctcctgcctcagcctcccaagttaggattacaggcatctgccaccacggctggctaatttttgtgtttttagtagagacaggtgtgcattttattgggttcaatttttaaaatattttaaagctttataaaatagcaacacaaggggtccttgtaagtggtagatacatgaaccaacacaggtaataaaattacatagagcttaatacacacatgtgcacacaaataagtgcaagtaaaacgggaactctgaggaaaagttatggattgtatcagtgctgatatcctggttgggatattatgatcttgcagaatgttaccattgggggaactggataaagggtatacaggatccctctgtattatttcttcaagatggagtcctgccctgctgcccaggctggagtgcagtggcacgacttctgcctcccgggttcaagtgattctcctgcctcagcctcccgagtagctgggactacaggtgtgtgccaccacacctggctaatttttgtgtgtatatatatatatacacacaaaatttttatatatatgcaaaattatatatatacaaaaatatatataaaattttatatatatacaaaaattttttttttagtggagacagggttttgccatgttgcccaggctagtctcgaatttctaacctcaagtggtccatctgccttggcctcgcaaagtgctgggataacagccattagccacctcacccggccccctctgtgttatttcttctgtctgcttgtggttatctacacatgactgactatctgaataattacagttaccttaattcaaaaacttagccttaaaaatttgagtattatctctaaataatatagtgttagagaaatagcagctctgaatcttcttgtacagataatagagccaggttagttaaaaggtagcccagttttctttttttccaggaaggcagaggactcagttttttgaggagagtgggcgccggtgagtggggataagcaggccctcaagtgacaacacaaatttaaacacagagaccacttagttgctgtggtctgttacctggtgtataaagggtgctgcagatgctttggcgtgctggctggggggccccagggtttgtatctgcacgcctgcagaccatcacagctgtgcgtgaagaagactaactcgggttggtagcataggagtcttcacttaagcacttgtgtgacctcgagctgatggactatctagagcaatttgagctggacttcatctacatcaaattagatcctggtttaaagctacccttataaatctcccttgcttctccctccctggcagctctgtctgaggcagcatatttccccccacgcttggacaggagggatctcatgaaagtgttgggtggaggggtcttgtctgctggctctggtggcactgtcttggtagggtttcagatttagaaccagatttcaggtctcctccctaagttagaaaatcattccaacagatccgatttctctgagctaatttactaggatgatctctacttgcatttaataaaatattcagagacctattgaattccagttgctgtttgccatttgtaatgctgctgagtttgacttagtaatacacttcaattcccaaatgtgtcgcatgggctgttactgaatgtgggtcattaggaaagctttgactcttaacagaattattcactgaagtcttagttacaaaacattactaagaagttatttatttagtcccaaagtgacaggtttcaaaaaattttgcacgttggctggccataaatccatttatattcactcctcccccaatagaataaaacttacgctaccttcttggtgtttgttgagcggcgaatcagttccttgtcactgatttaaaataaaacaaccctgatgtatctttagcagacaaaagcgttcttttgtttcacaacccatttctccaacggaagaagaacaaagacccatagtcctaaagtgcttgtgtgcagccttgtatgaccacagtaaattgtacatgtaatgaaatattactctgtgtgtgtgtgtgtgcaatcatagtagtctttttaatgtatatttaaaaaataacaacctagttttcatggtatggagctggttgcataaccttagaatgtaggccacttgaggaggagggggctatgccattatgaaattatcagtttaagactattgtttaataattatgccaacagctgctttctgaaggatcccagtctgttcgtatggttgggtctgtatggttagtggagtctaaatcctacaggcctttctgatcattcacacatgggtggctgtgctactggcccccaccccacctacttcagtttgctgaatatctgtgaggccagacccccttccactccattgcttcaccctcagcacatgctcatacacacagacacacaatgtcaaggtttcacaggggttacgagtccccctacccccagactcatcctccagtcgttggaactgggaaatgaagtctggtggtggtgagtacattgcgggttgaacccagcgagccagtgaccctctgtgtctaatgtgcaggcacaacattaggggcacttttttagatgagtcatttgtttggcaggtttgtgacattgggagtctcattgtcatttttatttcttacagttttatgtgctgaaagagttggccagatgactaagacatataatgacatagatgctgtcactcggcttcttgaggaggtaagtgctccaggggaaggcaaaagagttgtttataattgactggttttcatggatactgattaaagcatgccttatcacctgtttcagtgaggaatcttggaaattggtctctttcgaggtataatttaatggctttactttttgaactagtagctatgtaggcctttatagctgtaattgtgtgcagatattttaaaggaatatattaatggcaccaaatgtggtgtgtttaaatacttgttagaatatccagttgtaagtataaaaaatcctgaaacattgactaatgatatattttaagtgcatccaaaaaatgtcagaaaaatatatcatatctgtgtcttcctaatgtatttaagtttttacttaggctagtggaatattgtgcagtgtcagcgtggaaataagtaaaataagcatggcaagaaaaatttaagaaagttgcttaagattaggtgagctgcctgtattttagagactgtagttttctgaatttctcggtattctgttgcaattgagaattaagtattatgaaggtctctagaaacagatgagtataatatgtgtatgtgcatgcctggaacaggccagaacatggtgggttcttagtatttgttgaataagtctccatcattaatgcactgcccccttcactgaatcaggccttaaatggacaggtgctgccttctagacccttgcttctgatctggaatctggaatgattttggggcgtgtgactatgatgtggaggacacagaaatcattgttactgttttcagccagtgggaggtcagggttgaagctcagacagaaactgggccagactcgtttcccagaggtttttctggagtgtgtggcattcttccaccgtttttgtgtgtctctcttcccatgtctctaccgctgcacatccagcattctcttcctggtcctgccatccactcctgtttgatcctctgacgtggggaagtcacaaactcatcagctccccagaagtgatgtcagggtttttggctatgtgacagggtgtcaagggcggtattttgggggaccgaccttcagcctttgggtgtcactccagttgcagctgtctttggtgttagccacgtggcaggctgccttggttggcaccaccgacttttgaaaatggttaatcactgacccctttctgctgcatctgtttcccccaacagtgctctccagatcttacaaagtgcttccggcacccgctcatcaccccgttcgggtcattgagtcttctgagaggggtcctaatctgtacctttatttttattccaaggcggccaccactcaagctcttggggcctcagcagtgagattgtagcttctctctgctttactcttccttgcagctgccaccgtccatgccctctgtgacccgctcaccctttctgtaaagctcctcgctgtgtagtcaaggccacccattgctcaaggtcctgaaccctcctcttcactgtcctgaaccttcactgtcactggggacatggctcctgctctcccgcccttggccttctatggcatttaactgcgttggttctttcctgcttctcagtcttgtgctgcagggcctgccggggacctttgaagatggccccaactccatccccaggtagtctgtgcccttgctgagccccaggcataggagtcaccccatagtcctgtttgttttgttcatccagctggatgaacaatttattttttattttttgtggaggcgggatctccttatattgcccaggctgatattaaactctgaggctcaaacagtcctcctggcctggtgcagtgtcttatgcctataaatcccagcactttgggaggccaagacaggtagatcacttgagcacaggagtttgagaccagccttgccaacatggccaaaccatgtgtctacaaaaaatacaaaaattagccaggtatggtggcctgtgcctgtaatcccagctactcgggaggctgaggtaggaggatcgcttgagctctggaggtggagattgccgtgcaccgagatcatgtcactgcactccacctgggcaccagagcgagactctgtctcaaaaaataaaacaaaacaaaacaaaattagaagcaaactacagccactgtttatttgaatctctcacatttttaaattaaaaaattctctcaccttgacctcccaaagtgctgggattataggcatgaaccaccgtacccagcctgttttatttttaaagggtcttcatggcaacagcgtctgtttatgtctttgtgttccatgtctaatgccattctgttcctgtcctgataagattcatgcctgagttactgcctttccttggaactaggagggtgtcctggttaaagtctaactgtcccagtcatgtggctgttgcactgtgcggtggttttcctgggctttggctctgtttcttctgttctcttgctatgatttccatgcctgccacaggcaggcaaatgggggattcgcacaggatcccaaagcacagccttccaccagcgtggagagttcgcttctggttttaaggggaagaggatgctgtggctcacctgggcttgctgctgtctggaatgcacctttgggcagagcttgcctcctcctcggttacagagagggtgattccactggccccttagtcatgctttttatcctgaaattggtgaatgagatgagtcagttgctaagtgtaggcggcaggctgtttggaatctctagtgggtgtgtcagtcagtgcaagagttcattggtaaaaaggggctgagactcaagttacagtcttttttaagtctatgcttttaaagcatagtgaggagagggagcaggcagttagaatgagctctaccttgcctcatttcttgggggaataaaggaactagttcttttaataccttatttccaagggcctaaattacttgtttgtggtctctttttctcattgtagtttaatccagtggccatcttctagctgttttcttgtttttatcctttttttttggtagggatggtgtctcactatgttgcccaggctggtcttaaactcctggccttctcaaactcctgattctcccaccttgggctcccaaagtgttgggattacagacataagctgccacgcccaacctgttttcttgtttttagaagtaaacattaatcatattttggctagagaaatgggaggtttttttcattcttataattctcaaagaaaaacccaaccagcttgttgcctcagtaaaattaaagagaaaaaactagagacactacaataacgtttctgtttaaattttcattttatctataaatatttttaatgtaactttttattttcaattttttaagtacatagtaggtatatatatttatggggtacatgagatactttgataaaggcatatgctgcataataatcacatcagggtaaatagggtatcaggctgagcaacgtggctcacacctgtaatccagacactttgggaggctgaggtgggaggattgcttgaggccagaagtttgagaccagcctgggtagcatagtgagaccctgtctctacaaaaagttagacgctgtaactgaagaagaggaaaactttgcccaaacctgcattccaaaaattagataggcatggtggtgcatgcctgtggtcctagctactcagaaagtgaagtgggagggttgcttgagcccaggagtttgaggctatggtgagctgtaattgtgccactgcactccggcctaggcgatagagtgagacctgtctcaaaaaaaaaaaaaaaaaagaaaaaggaaaaaaaggtggagggtggagaaagaaagggatatcatcacttcaagcatgtatcattcctttgtgttacaaacattccaattatacttgtaggtatttttcaatgtgcaataaattattgttaattgtaaccaccctattgtgctatcagatactagatcttattctaagtatatttttatacaatttgctgtgacttcttgctttttcttctggcagagagtgttctttaaaattactctaaagattacatttctggtatagaccagggaagtgtttgtccttagtggggcaagaagaggcgaggcagcccttaggtgcagggtttgaggtgtgacaggtaggacaaaggacttcattgttgagctcattgctctacttgtttctctttcccttcctgtctcccaattcctgttggtttctggccgtttgtgtgctggaagccttccgcatccttcaggtgctctggcagtcccttgccatgcctgagccatcttcattattatgctgtgtgcttgatttgtttgcattgaaatgtgcgtacaaaatgcggctaaaggccgggcgcagtggctcacgcctgtaatcccagcactttgggaggctgaggtgggcagattacttgaggtcaggagtccgatactagcctggcctacatggtgaaacgccatttctaccaaaaatacaaaaattagctgggcgaggtggcgtgtgcctgtagtcccagctacttgggaggctgaggcaggagaatcactagaacctaggtagcggaggttgcagtgagctgagatcatgccactgcactccagcctgggcgacagatcgagactccatatcaaaaaccaacaaaaaatgtggcgaaggcatgcaaaatatcagcgcttgttggaacttggcagcctggatgcatgaaggcaatgcagaccaggtagtcaggtagtgagctgaggagcactgatgaagcaactgctgagtgttcagtctgagaactagttctagtagagacattaggtagacttgagttagatttttggagactatacttccaaagagaagtgaacattggtattgcagttttaaccaaatccacctgaaaccacttggactaggtgctaattttcagtcagcctctggagactttaattctgtgcagtctccctcacacagttctttgaatcctttcctctaggtacctaataagcacagctgttgagtctgagaaatgacaaagggccatgaaataaggtacctttttttttttttttttcaattttgtgttttgagatggggtctcctgtgttgcccaggctggtcttgaactcctgtgctcaggagatcctcctgccttggccttccaaagtgctgggattacaggcatgagccactgcacccggccaagggaacttcttggtagacactgaccagtgtggataaatgtgcagagatgagcatctctgttgatggggcagatgcaccgtgtcccctttgccccgtgagagggccgtctccacatgtactgtgttcccagaaaggcaaggtcatgatggggaggcacaaattgtgggaacgagttgggggatttgcaactctctctttttttttttttttctttttttgagacagagtctctctcagacactcaggctgtagtgcagtggggtgagtgagccccgcctcctgggttcaagtgattctcctgcctcagcctcccgagtcgctgggattactggctcccgccaccacacccagccaatttttgtatttttagcagagacggggttttgccatgttggccaggctggtctcaaactcctgacctcaagtgatcccaaagtgccgggattacgggtgagagccactgtgcctggcctatttacagctcatttttgatactgtgatacctggctggcttgtgggactgtggtgacagcattgccagtttggggactgtggaaggcctggaggagagagaccatcatcctgcaagagggagccaaagtgctgttgaatccagtcttctcaaactgtacttgacctcaagtgctgcgctcatactgcagtgaagttcctgtggttagcaaagggagatgtctgctattgcatggaataattgggtggctatccaagacgttagaaataaaagcggatttttctctttattctaaaactcagtgaatcataaagctagagagtttttccagaatatctcagctagcctgcacctttactctaccttcatttaacagttgagggaacctatgttcaagtagggaacccatactctcccagtttacagtaggatagttcacctggagcagttcaatttgtgaccagtacctgctgtaagaaacacagcttaggttgtgacccagtactcatataggtgaatatgtgacaaacaacagtttaaacatgaaataatattcttattacatataatgcactttggtgttttcaattctgtgccattgtatttaagttaaaacaaaatgtcggttgctgttactaaaatggtttcttaacccactaatgagtttgaaacctgtggcctgaaaaatgaatctgttggcctggcgcagtggttcacacctgtaatcccagcattttgggaggtcgaggagggcgaatcacctgagatcaggagtttgagaccagtctggccaacgtggtgaaaccctgtctctactaaaaatacaaaaattagctgggtgtggtggcacatacctgtaatcccagctacccaaggggctgaggcaggagaattgcttgaacctgagaggtggaggttacagtgagccgagatcgtgctactgtatccaacctgggtgacagagtgagactctgtctaaaaaaaaaaaaaaaaaagaaagaaagaatcaatctgtagtgtactttatccctgtgaagcaaaagccgtttgcctgggaccgtgtgggtagttaatagcaggtgttggatcagaacctaggactcctccccagcatttttcctaccccaaacgacatgtttccattctttctttcaaaccagatgagcagagtaattagcatagacttctaaaatgatttaatttttctgacttctcctcaccttgccaaaacccaagttgaatctgactggtagcaactcgctaagtctgcatttgctgatggcgtctgtccactatcaggggacgtcttttttcccacagaggcttccctgactttatatgccactccaaattttcctctgtatactggctctgcctaattgatgccatcagctcagctaacagaaaattctgtgcccttaagagtgtttttgtctctgaaggatggcaattttatgcataacgtctccgttttgaaagttgtttttttcttaaatgaaacctaagtagccttttctaagtaaaaaaacagaaaagcatgtaattgtttttgagagtaactttaaacatttttgtttcacatgaggcaaaaataaggaattcaatgcattccagcctaatgtgtgctaaagaggctgcctccctgtgtcagctcttggcttcattgtcagagcattttagaatttctatatttattcattcattcacttaacaaatagctactgtttccctgtgccgggccctggcaatacaatagcccagccctcaggtggagagacaggttatcaagtgactgcacaaatatcaaaagcagttgcaaataattgtttttagaagcatttttttctttcctgtaggaacaaagatttgttttcattacattgtcaggcttccctttccttgtgtgatgtctgtgtagctctcacacactatgtgggcagaggttatgcctgttttaacaggcatcaaatgctaacacagatggtgaattattaattcctttgttatttctagatgcttatgttttcctcatttgacactgagcaccattgactccttcaggaaacacaggtcttttgaatctctgttctccctctttccttttgtagaaagagcgggatttagaattggccgctcgcatcggccagtcgttgttgaagaagaacaagaccctaaccgagaggaacgagctgctggaggagcaggtggaacacatcagggaggaggtaagacattggaggccgaggcttccagaggggcccgccacaggcctgggagctggaggcatggctgaaggagatgagagaatggagtcctagttggaaggacgctcccgagggcacgaccgcggcctgagcccagaactgtctcttctgaaacgttcacctggggactaaaagccaccttcctgcagctcctgctgctgcttgtgtctcttttctttcctcaggccatgtggatgggatggctaagggcgggcatggtcctcactcagtcgtacatctgtgtgccatgttgggccagccacagtccttgtcctcagagagtctagactctaacgatgcaggctgatcaagatgctccatgcttggcagaagggcacccaggctaacaccacaacgagcaggggttcctgagtcaggctgggcgtgggcagctggagaaggagccctgttaggaggccagctcgtgtacacagaggaaagtggtgactcacattcatcgttgtagtataattttgtgtgtgtaaaacaaaacaagacaaaaatagcctgttgttttcatgatagaaaccctcttatttccatgatataaatcttggctgatggatatcaatggtgagaggaagggaatggagcttttcggcttatcttagggtatctaggtttagaaggaatgatgctgattttctggaagggacgtggtgtggacagaggagagcggctgtggagtcagatggggttgctagggcaagaataagaagcttagagccaggccctacgtagtagcttctttctatcactctgttcttctaacagttaattttaactgtgacaacacttctccttgtttcttttccccttttcttattcctttctttttttttttttttgagatggaatttcgctcttgtcattcaggctggagtgcagtggtgcgatcccagctcactgcaacttccaccccccgagttcaagctattgtcctgcctcagcctcccgagtagctgggattacaggtgcctgccaccacacccagctaattttttaatatttttggtagagacggggtttcaccacgttggccaggttggtctcgaactcctgacctcaggtcatccgcccgcctcagcctcccaaagtgctgggattacaggcatgagccactgtgcccagcctttttttttttttttttttttttttttgagataaggtctcactctgtcactcaggctagagtgcagtcgtgagatcacagctcactgcagccttgacctcctggattcaagcgatcctcccacctcagcctcctgagtagctgggactacagacatgtgccaccatgcctggctaatttttgtgttttttatagagaagggtttcaccatgttgtccaggctggtctcaaactcctgggctcaagcaatccacccgccttggtctcccaaaatgctgggattacaggtgtgagcccctgcgcctggcctcttctcccttattttctatcagaaactttcttagtgggagtggatgcccttgttcatgttcctaagatgtattcaacctttttccttgttaaagctattcccagtacattgttgtctgggtttaacagtagttttaatatgatgaagcatagtcgccactatgtaagaaaagttttaatcctgggctttaagatttgataagggagaatgctgttgtattttaggagaaataaagtgattcgtgcattccctgcccccagagtcacgacctggattccctctcatgtgactggtgagaaggcatgctgggtcagcctggccccctcctagccacttctgagcagagggacatgccagccagtaactcacaaatggtcacccgtcagcttcttcactatactgttcttgcttgggacaagcctcaccttgcacaaagaggatccagctctctgggagtggaaatgccttttttcccccttggaaaagctttgaatttgaaagctatgaatgtttccctttggcatattattaaattatcagtctaggtgtcgaagctaaaacttttatgcacgtaaaattgtcttctccatggaagacgtaataattcactctgttttgtagaaaagttgcaataaaccatagaccctaagtcaaattataaacaagaaagagttaaaacgtaactgcaattcttcttatagcactggttccctattcttcagtactgcagagtgaaagggcagatgaaaacttttacagtccaactttatttaaaaaccttaagtacaaatcagggtgatttgcaaagccatctcagcagaagtcaatgtagccattccctgatggttggctcttttcttcctgtgtgtgaaattcctatctagtaagcattgagcacggaacgaggtctggctgggcttgtccaggagccttgtgagggtgcatcacagaatggggctgtgtggtcatccaagtgtgagagcaagggtcggtgagctgcctgtattgcccgtgcagagctggcatctccaggaccctatttggagttgggatttggttctggcagaagtgaatgaatggccttttctttcatttagtaacatgatcaatttttctggctatttgcccagctgatcatctggctatttccaaagcccctgaatagttgcatccccacaagcatcattcttttttcttttttttgagatggagttttgctctgttgcccaggctggagtgcagtggtgtgatctcagctcactacaacccctgcctcccgtgttcaagcaattctcctgcctcagcctcccgagtagctgggattacaggcacatgccaccactcttcgctaattttttatttttagtagagacggggtttcaccatgttggtcaggctggtctcgaactcctgacttcagatgatctgcctgcctcggcctcccaaaatgctgggtttacaggtgccagccaccgtgcccggcccccaagcatcattctagtcccctctctgctcctccctgtaccaaagtaaaaattatgaatttagacagctttctaccaaaaagtaattgtgtttcttttaaatagattaaatgaaagcctctttttttgaatagcacaaaatcagtttaaatgctttcactttcaatggtgaattttcagaaaaatattgtccctaagtgttaagtgttggaatgtgagtcgggggggacagtatcaccttttgggaagcaaatgatgggcctgctctgcttgtgcaggtgtctcagctccggcatgagctgtccatgaaggatgagctgcttcagttctacaccagcgctgcggaggagagtgagcccgagtccgtttgctcaaccccgtaagtcaccagagggctgtatttctggaggccagagcacaggctggccgctgttgatgtccttggagtcacctagacagggtcaccttcagcagcaatggaggtcagctgctctcagccttctctggaccaaacacctccaagtgcctcaaacagattgattttactattttagcgggatatggatggacaggtttttagttttccttttcctgggtcttattgcttatttgtcaatttagattgatttgccctggcacattaatggataatgggttaggctctgctgttggagagtattcagggttctggagccagaggtgctgtggcaggtccttgggacagaaggcgtggtgtcttctctgagagtcagcagatcctcatgttgggagcatgaactccagagcccagtgggctggttgcagatcttggctctgggacttactagctgcatgctgttggctaggttacttaacctctgtacttgttttgtcatttgtaaaatggagataacagtagaacttaggtcacagagttataagcattaattgagttaaaacatacagagtacttacaaatgcattgtgagtattaaataaactcccagacatcctggaattgtgtaggctttaaacagagttggtcccctgaattctaaggtgatgtggcaagttgtggataaagggttgagatgtgggttcagaattggtggtgagcctgtgcactgggggcgctgtcttcctggggttgggagagccgtctggtgggtcattgtccttcctgcaagcccttctttgtgtctccacatggtttgccaggtggtgggaggaaatgcgtctccctaggttgtgagcgtactttctcccccaggttgaagaggaatgagtcgtcctcctcagtccagaattactttcatttggattctcttcaaaagaagctgaaagaccttgaagaggagaatgttgtacttcgatccgaggtgatgtgccctcccttctcttgcccctgctagaagggtggtggccccattcgccttatctggcaaggacaaccatggttaagtgccctcctcaaagctggcagtctgtgaagagctgtaccaggcgctcggcagatgtgcctcctctatgctctgggcactgccttccagcccaacacatgcctccctggctggggcaggcaaacctggtgaatgacatggtgtgtggactgggaagagttggagggcccctccttcacagtcactcctgcagtgaggtctcccatggtgttctccagctctgaccacagcacctgtggagaaacccagccttgttttcatgctgccacagatcagatgctcaaggaagtagtccatgggtgctcagagagagccatatttctttttctttttttctttttttttgagatggagtctcgctatgtcacccaggctggagtgcagtggtgcgatcttggctctgcaaccttcgcctcccaggttcaagctattctcctgtcttagcctcctgagtagctgggactacagacgcatgccaccatgcccagctaatttttgtatttttagtagagacgaggtttcaccatactggtcaggctggtcttgaactcctgacctcaggtgatccacctgcctcggcctcccaaagtgctggggttacaggcgtgagccaccgtgcctggcagagtcatatatttcttaaacaattaactcaaaaaggttgagctgaggcaacttggggactcatgcttttgagtttgttttattggcaaggcagtgtgccaggcattttgcccacattttttttttagagttcacagcagggctgaaagctcgttactttgattctcattggaacggtgggccccaggctgctaggtgttttgataacccgaggtcatttgagtgagtaaatgacaaagctaggatttgcaagtctgtgactctaagccccttgtttttcaccttcacccactgcccctctctagaaacaccgataggtgcaaatttagtactgtttgtcttaattagtggtgagtttctgttctctagccgaggtatggtgtggtacagtacggccctgtttatcaggcccctgtgtgtcaggttggagctgtgtgcccacctaggctggccctgggttcttgagagccccttaatagtgcagaccatctgtcaacttgaacttgcccacaccttggtaagatcttcatgtcccgtctgaacaagatgctcttctgcacatcttgttctgttagacctcacctcttccagcaccttgttcactgatgggtcatgtaaacccagattgaccaagaagtctgcctaggtttcctctgccagccagttgctgggcaaggcaacagccctgtgctccctattctgagttcagtgctacctcttccagcacctgccccaggtaaatgctccagccccgggcgcccagcaactcacccaaagctagctgagggaatctgatcccagctacagattcctgctaccccacatccattttctgaagtgtaatgattttctggggccaggactgagggctcagagacacttctgtctaactggggctcttgcttgcttgcttgctttgcctctttctctccctctttctctcctccctccctccctctctcccttcctccctccctccctccatgggagtcttgctctgtcacccacgctggagtacagtggcgtgatcttggctcaagcagccctcccatctcggcctcccaaagtgctgggattataggtgtgagccactgcgcctggtctcggggcttcttctttgggccttcagatctctatcatcccacccttttcagccagggcaagttgtccagagtcctggggtggctcttgtgcctctgcattttaatgcttttgtgttggaccttgttcttactaagcttgaacacagcaggtttaactccaacttgggacctcatatgttcagtgcctggcacatagtaagtgttagccattcctgtgtggttatccttaggatgcctgctgtgggtagtgtcctaggcactgtgcgggtcacagagcatccatatttatgagccaggacagccacaaataacagatacaatgataggatggtggtgttcgtggtgtttttaacagagcaagctgtagagcacctgtgcccgtagctgtgtgtggcgccctctagtggtatgcgtttttcaggttttcagctttgagtgcacatccattattaagctgggaattcagatggactttctgtatttgagggtacgatgggtgacaggtgggggaatgctaagggcagcttcccagaccccagttagcctttgctttatgcctcagcccttgcctgcaccaccaggccaggtgagaatgtggggcctctgacctgggtcttgtctacaggccagccagctgaagacagagaccatcacctatgaggagaaggagcagcagctggtcaatgactgcgtgaaggagctgagtatgtccccgcactgctgtcttcttacttccttgcatctgctgtcatgattagacagatttgcgtcagccttgctaaagtgcagtctcctgccagcctacggctcagcagcatttttcttaaaactagaggcctccccaaccttgtgtggcaccccctctctattatttagtgctaagttgccagctatgtattatctcagtttatcactgaggtggatatttaaatttaattttggctttatactggaatattggaatttttttttttttttttttttttgagacagagtctcactctgtcacccaggctagagtacagtagttgcgatctcggctcactgcaacctctgcctcccgggttcaagtgattctgccagcttagcctctcaagtagctaggattacaggcacccaccatcatgcctggctatttttttgtatttttgtagaggcaaggtttcaccatgttggccaggctggtcttgaactcctgacctcaggtgatccacctgccttggcctcccaaagtgctgggattacaggcgtgagccaccacccctggccagaatattggaattttttaatgcctaagttaggcccagctacagaaaactgtgttgaaaatgtggcagaacagcttactaccagtaatttgatttgtggaagctgaagccagggttctcacctttgcaaataaatatttctctcctcctcttcattttaagtttacaagttaagaccaaaggtcaaaatactaagtatattgcatttcgtcaaagtactaagtattttgcatttcgtcaaagtactaagtattttgcatttcgtcaaagtactaagtattttgcatttcgtcaaagtactattttgcatttcgtcaaagtactaagtattttgcatttcagcaaaataatgatgaaacacacctcatgttcaaatctagtcaagtgagttatgactctgaatatgggttgaaaactccaaggaaattgcactgtgcagtcagtagttcctttttagaactgggtgcagcaggggattcctgtttagtcacatgggttctcttgtgtggaatgtgaggatgtggctagatgcactcatgttttgtttgtcactttctatctgaccactggagccttcctgatttgttctggggagacagccttggttggtgggcttgggaccctacactgagctcaggagtgctatctaatggggtgagattctttttcataactgattgagccctgaagaagctgctttgcttctccatgtgggaaaatggtcattatgagttccttcctgcaccctccccactctaccctgtcttttagtaaggatggtttttcttgtgcaaaccacaaagaaaccattctctctgggtctgcatgtgtggttttctgacttcctctcctgattgttgcttctttgtcaaaggggatgccaatgtccagattgctagtatctcagaggaactggccaagaagacggaagatgctgcccgccagcaagaggagatcacacacctgctatcgcaaatagttgatttgcagaaaaaggcaaaagctgtaaggcttctctgtttatctggctgatacaacaatggccatgctgagacggggaagggacatttactccagaagacagtgctctttagtttcatatcttagcagttcgtgttgccgctttgcagaaaaagcttagtggactcagtagtataaaactgattacctgaattggtgacgagtcttatttgtgacctcttatctcctaaaattatattgaattcattaaaaagatgttgtaaatatggacttttgcagtttaacttatggatcatctagtctagtatttgtttttacacagtgcactagatatgtgctgcagtagagcagtatcctcttcagatttaagaagaggcagcaaaatggactttgctattagtgtggggtaaaatgcttccagagagctttggaagatgggggtggggcggtgggctatagagaatgaatgtggatataggaaagactttaccttcaaaataatataaaaagcagaatttgagtataagatgagcatgtccttgtagaaagtgatgagttcattacagattaggttaataagagggaaaaagttggacttttaccaagtatcttaggaagtgatctatctttgccatgctttagtgcgcagtggaaaatgaagaacttgtccagcatctgggggctgctaaggatgcccagcggcagctcacagccgaggtgagcacctctccctcattccttcagtgcctctgattgcagccaaggtggattagccttcccggacagctttagtcacgtccatcgcaactactgtttttattttgaatttcatttcatttttattcgtgggagagtaaacccagttgcaccttggttctgtgcccactgacactgttactggttatgggcacctgtgtggcagggctctacaccagctgagcctggcacgtgcaggtgtccaaaaaatgttcaaagaaatgaaacaatacaacacagagcactctgggagaggaatctcacaggtgtggcttgaaacatgggtgtgacgattttctttttctttctctctttttctctttttgagatggggtctcattctgtcacccaggctggagtacagtggcatgagcatggctcaccgcagcctcgacctctccaggctcaggtgatcctcctgagtatctgggactacaggtgtgggctaccacacccacctaatttttgcttttttttttttgaaagatgaggttttcccatgtcgcccaggctggtctcagcttctgtgcccaagcaaactgcctgccttgccctcccaaagtgctgagattacagctgtaagccatcattcctagcctgatttttcttttgcatgaagttggttttgtttcatttgcccattgttggtattttagaagatttctgagtctgtaagcttgcctcaagtcaaagaaaaagcaagcctttgaaaattctgttatttggccacaggcgcacagggcagctggttccacacgtgctggggactcttagattgctgtgtctttctggccttcggatgggcagatgtgtgtacacctgggtgctcaggagatcctgaccctctgtgtctttcctgcctgcagctgcgtgagctggaggacaagtacgcagagtgcatggagatgctgcatgaggcgcaggaggagctgaagaacctccggaacaaaaccatgcccaataccacgtctcggcgctaccactcactgggcctgtttcccatggtgagctgtgctttcttcccagccagaggacaggaggggttctggtgacaggagcacagtgtctgacattctggccactggagttgggtgttcacagttcgcttctcgttgtacagttcagatctgagtctgaatcaaggacacttgaatctgactggtggtttcttaactacataagacaaattggttattttctgttcctctaaatctgtggtcttttctactcctgccattaaaagataaatttagtaggaacttgctttagtgggaacctgaggtatttggaagatctgactcatacaggttgagcatctctaatccagaatgcttcacaatccaaaacttcctgagcactgacatgatgcattgtagacatttaatagacattacgtttagacggatagttggacagatagacagatggcctaaagagcaaactcaagaactcctgtgtattccagctctatttccatggtttgatgaaatgctaaatgctctctgaggagagaagagcttttgagagaaactcccccaagtgagataggagcggatggctgcgtaaatgctcgtgagattctgtcccttctgaaattggccttttccttggagctctttcccttcagcccccattgctgacccccagcagatactatccccatcccccactccttgttgtctggcccaccttccctaaatcgtgatttcttttcttctttgctcccatgcatcaaagtcaggaagtcaggctagaatagccaccaccccctctccgcctcaagaagcttcactgaaatctgagggaaacaaaaagaaagacatataacatagtcagctttctagggcacagatgggtgatccagtgattccaggaatctcagtaaaagcagcaaagaatattcagtcccccaagttccctgatctagcgctaaccacacttggctcacacgctggcctgtgtagctttgcaggctccttacctgggttccctccttcctggcttgtcatcttggtgcagtgagctcctggcgctgtcttgtttcctgggcacccaggatccactccactgccttccccactctcaagggcagacctctctttgaaaactgaactattgtgtgagaaaagtcgaattgaaatttgcatttcagtttctttttgagggattctcagctttcatatttgctgaggtaaagtttttgtttgcctttttctgtagctcttggcacagcccagtttttgaagatggctatttttaaagtgtattatgcattaaaggtatttaaagcagtctaaagattgcatcatgcagaacgcccagatctgcctcttttgctcctagccattctaatcgctgaataaaacagtgagtagcagtttttgcacaactatgttcccaattctcttgcccaatggcaggagttcatctgggatccacagacgaaatttggggggggcctgtgaaattagttcctaattgtactcaatatttccttcctgtatgaaggtcaccaggtcacagtgatattagcactgcttgtgactttgtcatcattagaaatcacaggtatttttatggcacatttctttttctcttcttcttttttttttttttttgagacggagtcttgctctgtcatccaggctggagtgcagtggtgcgatcttggctcactgcaacctccctctcctgagttcaagcgattctcctgcctcaacctcccaagtagctgggactacaggcatgtgccaccacgcccggctaatttttttttttttttgtatttttagtagagatggggtttcaccatgttggccaagctggtctcgaattccttacctcaggtgatccacccgtctcggcctcccaaagtgctaggattacaggcatgagccgccgcgcctggccctatggcacatttcagttgttacagctgcctcacaacaccacagatgctgatctccacttcaaaatgacagcagtaaccagtcctgaactaatttctctctcctttctcctctctctctctctctctctttctctttctctctctctctctctctcacacacacacacacacacacacacacacacacacacgttgttatattgatacatatctgccttcttttataatcataattttatttgcctaaaaatattattccaggaaggagtccacagacttgcctggattgccagaggggagagggtcatggccaaaaacaagtcacagagcctgcatgtgactttttctcagtatggctttgaaattacagtcatccctgagtatctgagggggattggttccaggaccccctgcagataccaaatccttcaatgcctaagtctctgatataaaagggcatagtgtttgcttataacctatgcatgcccttccacatacaaaaagatcatctctagattgctggtaatacctcatacaatgtaaatgccatgtaaggagttgttatactgtaccgatttttaaatttgtattattttttgttttttttccccccaaattttctatctaagattagttgaatctgaagaagtggaacccacagatacggagggctgactgtagtaatttgacacttcatttttcttaaggtgtatgaaggtcctttcttctctatttgtaaattatgtggtgaataacagtattaaaaaataagctggcttaaaagatgtcagactcacctagggaagtccttactggacataacgtttaatggcaatctgtgggtaataattacaaaataaaatgcatatttgtgaacaaggactgaaaaaagcctgctagccctttattcatctcacttcctgctgactcctgtggagtctccccgcttggttccagcctccagaccggagcatccgcatggaccatgaagctgctgaggtggatgccctggagtccccaggcggtatctgctgggaagccactggccacatgtggctgtgcaaatttaaatcaattaagttaaaatataattacgaattcaggtcctcagtcacaagccacatttcttgtgctcactagccacccctggctggtggtttccacatgtacatatgtcccagcacagaggatgcgtccatcatcacaggttgttctgttgtttaacatgaatttagcctttcccttcaggttatcctccatggatatcctcctctggtgctgaactggtgcttttctgcacacacttggtcctgtgggtatctaccatgtgtaaaggattgtgtgttaggctccacctcctacagtgctgagtgatgggtggtacaggagaggggacatccatctggcagcctttaatgttgagtctcagcttgaggcctggcccattggtgaagtgagaagccatcagtgactagccttcccctgacccacaaagctggagagagaaacatgtgagctgttgagaagagtggcaaagacttactgtgtttggtgtctgcttcagaaaaaaatgtgagattcctagtggaaacaggaatcctacatttcctgggcaggttgtttaaaggtgggtgggccatggatagttggcggtgagaggaacttcccttgcaggaggccagggaggatgagagcagggacctagagatggcagtgcgtgtgactcacgtcacgtctgtagagaccctctcactagcacagaaccagagtgccctttggaggtgggaaaggcttccccaggagccgaagttggaggcccttggtctattcttggtgtcagaatcttagacacagagggggtgtgacagaccctgtagactagggggacaatagctttgtgtggcttgtatgggctctgttgccatatctcactgtaagctcagaggtatttggaaattcacctgtctccatcattctgaacacatcacccctccctcataagttctgcatcccatctcgtagccatggttacagctccatggtttggccaacggagcatagggtttgcttttagacacctaatggcatatgagtcagcagctttacactcagtgcccagtggcactgccacactcagaacctgcctgggaaactgctcagccagggtctctgacaacagagagtgctgttaagtttgtgttgtgggaagaccgtgagcttctgatgccttggtttactctccatggcccacctgggtgcatacctcttttagagacagagcatttgaattggcgctcacttgacatttgtctttctggcttttcccaggattccttggcagcagagattgagggaacgatgcgcaaggagctgcagttggaagaggccgagtctccagacatcacgtacggccacagtttttacagttttgagattcccagagaccaacttggaccagtgcagtgttcaaaacctagcaatgttgaggctctgggtaccgacagtgattgactattgtccttcccagtccagattaagggaaataatagaacacagctgacagcatccctcagctcctcttattatcttttgttagtgttaatttttatttatttattttttagagatggggtgtctcactttattgggcacgccagagtgcagtggtgtgatcatagctcactgcagcctcgaactcctaggctcaagtaatactgctgcctcagcctcttgagtagctaggactacaggcgcatgccaccatttccagctaatttaaaaaaatcttttgtagacatagggcttcaccatgttgctcaggctgatctcaaactcctggcttcaagtgatcgtcctgccttggccttcccaaagtgttgggattacaggcgtgagccaccactggcctgtgagccactgtgctcctcttcttcttaggttttaaagacaaattgtgaacttccagaaagtcctagaaaaggagagatgtctttcccatctctcttaacacaagctttgtcttgatatagctacacgtttttatctttcctttcagtggaaaacatttaaaaaatttaaaatcaacgtagtgtgagattcagaggggtcttcaaagattttgtgcaaggcttccatctccatctgaatacacctagggatatgagcttctaccatctgtcttcctacctcaactcttgtacttaacctgccccaaggtgtttgtaaggaacatgtggaccaggtttcattgtgttttctgtgtactcagactccatagacagaacttaaatgagatcctgggagtggcaagtgtccaagtgaggtttggtatatgtgtgacaccctctgcagcccagaaggaagtggccattgtaaaaacatgcctacccttttctctttaaaagggaacaaatgagcatcaaagtggttctgctcctaaaataacactttccaaaattagacaaatctagtatttatcatcttattatagaagtgaaagactaacttgaagtcttcctttttttatatgaatgttcaacaaatatccattctacaagtattgattgatttctgctgcgctgagcagtaaacactgccctgctgcagcgtttattctagtgaatattatgaaaaaagaaatctaggagacaaaagtcatacttaagtatttttatttgtgggttaagctttagggatgtgaaacacaatttcactcttgctggcatcacctttaggatacaaccatgcgttcgagtcctgggtttagtgggtgttgaatctctcaaatttcgcattgtgaaggaggcagccaataccctaagaaacaggtggcaggcacaggatagcaggctgctgggggactcgtcataggccaggtgcccttttggctcagttgatcatttttggagggttaaactccagggttgtgcccgcatttgctcactcacggatgccgtgcattctccctagtcaccagaagcgtgtctttgagacagtaagaaacatcaaccaggttgtcaagcagagatctctgaccccttctcccatgaacatccccggctccaaccagtcctcggccatgaactccctcctgtccagctgcgtcagcaccccccggtccagcttctacggcagcgacataggcaacgtcgtcctcgacaacaagaccaacagcatcattctggaaacagaggcagccgacctggggtgagcaagctgggagttttcacttctctgttttggggtgaggagtggtagtatggattgtctgcaggctcagtaattattaagagggaggtagatgagagtcacctgaaaaatacagacctggccgggcgtggtggctcgcgcctataatcctagcactttcggagaccgaggcgggaggattgcctgagctcaggagtttgagaccagcctgggcaacattgcaaaatcccatgtctactaaacatacaaaaaattagctgggcatggtggcatgcacctgtaatctcagctactcaggaggctgaggcaggagaatcgcttgaacccgggaggtggaggttgcagcaagctgataattgcaccactgcactcctgtctgggtgacagagtgagactctgtctcaaaaaaaaaaagcggaccttacagttctccaaatctgttctgcttacccacttgagcctatgcctatccttgatatgatattttaatcagcttaaagatgtataacaagatgataccagaaagtctgctttcctgtgaaatgcttgggggaaggattaatgaatatttttttttttgttaatcttcacggtaaggctacagaatagacatttgttttgtgaccgttttgtagcttgatgttggaaaggctgaggaggactcaggctgtctgtcttgtgaccagaatgtggtcacaaggttcagagggtggggtgcaggggggccaaggtgcccaggactgggctttcctcaggaatggtcagttcctctttgtcctgaagccctgcagaacctggacggacggacggacggacggacagacggacacacacacacacacacacacacacacacacacacacacacacacaccattgtctactttgtgcatccttttcctctgacttaataaaattgattcttccggaccagttggaacagacagacaggaagctccttgatcagagcaggttttgttcagagttggggtctgggctcttttccttcaagagaagagagaaacatgccttaaccccattatccttctggtagccaggaacagcaacctacaggtttcttcctaaaggttcttcagggagatgtttacagggactgaatttacttagtctgtgtgcagatattcatcccaccttagtcctcaccccacctcaaccccactaaaaaagacccctggcgggagtggttctggacacgaatttatttccccctgttgcctaaatgtcaactgcttgccttggttcccatggagaatcctgtagccccagggaacgtccaccgctgtgcattgagcagtcgggcctctgtggccttggagccctgctggcattccaccctcacacccctttcttcttccagaaacgatgagcggagtaagaagccggggacgccgggcaccccaggctcccacgacctggagacggcgctgaggcggctgtccctgcgccgggagaactacctctcggagaggaggttctttgaggaggagcaagagaggaagctccaggagctggcggagaagggcgagctgcgcagcggctccctcacacccactgagagcatcatgtccctgggcacgcactcccgcttctccgagttcaccggcttctctggcatgtccttcagcagccgctcctacctgcctgagaagctccagatcgtgaagccgctggaaggtgatcacgcggggcctcggcccctctctgtcctcctgggggactccctttggtccctgatccacctgcggaaggcggggcacctctgtcacgcctactcctttttcttccgcgacagccacccgcgctgctggtttgagttcctctgagggtggtgctcagcctaggcctccgtccctcccctctggctggcaggtgtgacaatgcacacataggccatgaaactcgccgaggaaagacaagcatgtgcactgtggtcttctagttctttcctttgcctttagaaccttagaaataaaaacttttgtggcggtagaggcactgctaactgattcaaaaattaattaggttttgcctgtgggtgtgaggaatgcagaaaattaatgctttagcttttctgcagttttggtgtcggggagaggttccaagcaaactctattaaatggggatttttttttccccataaccacctgaatgtgatttgtgggcttatgtgttctgatttgaacttcatatagcaaggttgtggcttttggcagatgcagtatgttctgagcgcggctcctagagtctacaatttggagtccaggaaggggtggctgtggagacaagtgagttttgtacctccgtaagccaccctttttcagggtcagttcatgtgttagtatcaggggcatctcagatgattaaactcatgggaaaaacttcctccttccctctctccctcttgccctcctgcctctttttttttttttttttttttaatttaggcacttataaaatgttttccctctacctgctgctactctgccaagagccaccaagtgcttatatttttcattttttactcctttagtttggaaagccatatacgtttgagaaggtgttttaaaactctgtgttacacttacgatgcaaagccaaatcagaacttctgtaaggcagaactttcccaactttaaaaaaattattgtcccctctaaggagccttcttagacgttttttcctaatcaccccccaaagacattttaataccacatatatattgtttatgtactatatgtatatacataaacaatacataagcaatacatctgtggtattaaaattaaaaagaatccaattatgtttacctcaaaagaacctgtttttgcttcttgggagcaatattgcccctgtgagactgcatgctataaggtaaggttgtgcttgttaaagacccaagacatgactgggttccacagtctccaaaggaagagggtgggctagtttgtttttattattattttaaaattgtataattggggtctttcttagagttcagaaaaggtatagcttactcttttttaattgtttatttagttgtaagcttggtgattgttttctgatccacattgtgtgtgttcttcaataaaatctttcatttctgcaattttactttctgccttacttttcttttttctcctttgtcactcaaagatcattggaatttatcatctctgtcttgtctgctttctatatttgactctgtgtttcattagatcatctaagaatatgtttttgaatttattttcaaagcacatgttttagccagttcatctttatgtcttttaattttgtgacttggcagtatttttgtgattagttaataggataataggaaatcctgttagattagcaaggtgaatttcatctatagtgctctgctacccaggaggctaaaacaatacaattaaaaagttatttgtcttatcacagtggcctataacacaacctcatgatacagattcttttgattccattttgtagttctctgacttcttagctgtttatttatgtatttagtttttgaaacagggtctcgctgtgtcacccaggctgcagtacagtagtgtgatcatagctcactacatgcctgaattcctgggctcaagcaatcctcccgcctcagcttcccaagtagctaggactacaggactgcaccaccacacctggctaatttatttatttgtagagacagggtcttactatgttgcctaggccggtcttgaaccattgccctcaagttacccttccacctcagcctcccaaagtgttaggattacaggcatgagtcaccacacctggctcagacttcttagctgttacaaccagtattttcttttttccctcccctccacagttattttttgtgttaccatgtttaatatgataagatgggatgctgacacagaagtcagcctgggctaggttcagtacagctctgactgtgacattagataaatcaccccactttttgagccctgtttcctatttagttgtggttgtgaaataggctgatagccatcagaccagactgtggtgaggagtaaatgtgaagtattttatattgtacctggcatctaataggtgcttattaaaatgttggcttcccaagcttgctccaatccaggtctgtagggctgagttactagtattgagatctggaccagcactagggtcatgttcttaaattatctttttctattggcccactgagaagctagtaagattcccataatcaccagcagcccaggtaaatgtacctggggtgaggtccctagagactgttggctgagatcatagcagatagccaatcagtgttttccatctggctccgttacctgttgaattaatcttgccatctgcttattgtgaaagccaaaaagctaagtgtttaagagtgctagcactttcttgtctcttcatcttaccttaccagttttaagcaggtgaagaacaaacaaaccattcaaactagaaagatatctgtgttaaaaagaccaaggcgggcagtatttttttcctgtaatttgcacttcctttctgcttaatcataaccaaggtagcatttccaaataaataatatgtaaataagggaaaggatacacttcaaagctgtacattatccagcaggtttcattctagtatctaagccctgatgctcctctgacatcagtggattttggggtttcctctcctttgatgacttgaaaatgttttagctggaacactggggtatggaaggaaagcagagggggaaggacgcaatgaccatagtcatgttttccccactgtccgtgcccttttcccatagaactttatcttggggccaaccaggaacatgaagtttcctctctttccttgccctgtttgcctaattcctgcctggttttaatgtgggtgggaggagtgagcaggtcttgagttggtaatgggaggtagctcatattacagtgtttggcaagtaaaggaagccaggctggggaatgagctggagaaatggaaagaaagaggtaacttgggctctgaataagatgcaattcatatttattttttaattcttataccttcttatgtcaaaggaaggactccaggcagccaggggattggtagaattcccacatgatggtttaggcagcagcagggaggtgaagcatgaggtgttctgcccagttgatgggtttggcaaaccccgctgggactttggaaccagccagaagtggagatagtccatgagccccatagcatgacataactgaaatagcacagtcaggtttgagaaagcacccacatgagaatctagaaagccattcagttgtgttattgactaggtttcggaggctctcatgtgtaaggcctgtcactgctgagagttaagagaatggacactggagccagccttggtttcagtcccagatcagtcaagccacttgccagctctgtagcctctagcaagttactttcccttcccgtactcaagtttcctcatctgcagaatgcagacagcagggataacgtgaagattaagtgaattataaatgtagacctcagaaaagtgtctggcgcttagtaaaagcccagtaaaagttggctgttcttacatgggtgttcttacatcccaaggcatgggataaaaatctgagcatgatgcgtcttttcacataatgttttagttgtaatttcactaaatttccttggctgtggagtgtcagagaatgcaagtaattccatgcatttctgtggcatccttaactccaaacagcagaccctttgtagcctcatttctttctcttcagcccatccttgggagcgggtgaggagagggagtgatggggcagcctgttgaacagttggaggagaaaggcctatgagactcttgtcagggcccagacctccagcctccctgggttctttcccagtgaattgtaaacatctcagacccccttcagaaggatgaggaggttggcatttccttaccagggttcttcacttcccagagtctattggcataccccccttttcccttccaaaagtagaggtgacgtggccatattgtacatggggttttctcatcatccttctcagactccagtgtacagtcccaaactgaacatggcagtacagtggctactttaagacttctcgtggtgctattttgttatcaggaatgtgcctgcacagccagtgagcatttgtactggggcccattaggtagtgtgaatgggagtccgcagggacagcagagaactcctatcagcaggaatatctcctggcaggccctggacacccatctggaaattctgctgctgaccatttgtgcagctgggacactgatgtccttcttgttctcagacctgtgggttttgatgggtgggcagtgaacccatcaaatgggttagttctgaaccccggctatgccaccactaattaagtggctttggaaagttatctaacttcaggcagccaccattcccctatctgtaaagtatataatcatactcagttcctaggatggtttcaaggagtgagctgatataatacatgtaaaacaaactgcgatgcaggcctgcctcaatatagggaagcttaatttaaaaaatcacagtgatgctgtggcatctgggactcgggagcccacgaactggtctctgcaggtctgcgaagccccggcgttgtttgcacagtgttgctagcatgcacacttcctttaggaagtgggtccacagcttccttcagattctcgaaacatctgagagttaagaaccacagctctagagaaaggcttctcaatcccagccctgctgacatttgggaccagtttgttctttgttgtgggggctgtcctgtacattgtgggatgtttggcagcatctctggcttttaccccctagatgccattagcaccagatgccgttcgtccacagctgtgacaaccaaacgtgtctccagacattaccaaatgtccctgggggagtggggtacggggcgcaaaattgtccctagttgagaacaccgctctagatgcatcttagcacctagtgagagaacggatatgtgataccctctttcgttatagtcattcttatttctttttttcttgaatttagaatattttctatttatatttaatagatccaaattaagtatgttgctattgtacccgtgaacccttaaaactgggataagccttgatgtgggtgtctgggaactctttaaacatgtattggcagtgtgcaccttttttttccttttgagtggatttgaaattgttcatttataaatccctttcaagcctccctggctgagatcgacacatgagaagttatttccaaggggtgtttggaaatggcagactctgcgcacaccatgcggcctctccctcaccccaccgcctcccacctcggcctgcctgtgttcccttctcttttgtcttgacttcctgagctgccgactcctggcatctttgactcccttttcttcgctccccagggcaacctggtatcctggagggcttcttgcctacccagaaagtatacccttggtaaaccagtggtgactgcccgagcatccatttgtgcaggaagcctcctgcctttcggtgcccgagaacctcttcagaagtctctcctttgagcatggaatatttatttgtgtggccatgcatatttgggtgccttcttaatctgtagaatggggctagccctgccagcctcacgggccatgcactagcatggtgtcatgtgaggtgttaataagtgttccaagggtaaaatgggttgctctgtcaagtaagttggcaagaacaccgtagcatactaaaggttctgtgatgcccctcagtaaaaacacttaactcaagtttcctgagcatgcttggcctaggaacacttctctttgtagaacacttgtgacaccttgaggtcttcagggacacactccagtgttattacagaccttgcatgatgtcatgtgagtcctggggtttggtgtcatcgagaagatgggctcccctgctttagacctctgtgtggacttactatgttcttaaatcacacctctttaacccaattccttctccctaacccggcagcctctcaaagttgctggcaaaatacagaaaacctaagtaaaggaggtgatggccacatctgccacacatctctgtgtactgctttcatttctttttgcttttctcttgctgttggtcgtgggcttggtttgacatgatcttattctgcctgagcttatgtcttccgtgttcccaggagtgtgtatttggcatagaatacgtacatgtggccccgcttttgtgcttatcttgccattttcccccttccattttgtaaaatgagaagatgttgagttctggggttgacatcagttgattaaaataaagaccttgccccaaacctcttttgcacatactatggtgtggattttactttaaaaaaaaaatggttgatttcttaacttgctattccttctgagcatggtagggtttggcttctgtttcatggcaggaagggctaaggcggctccactgaagttcccgctgcagtccacctggaggcccagaccctgctggggttcacgctaagcactttgagggtggtaaacagccattgtcttggacttccatcctaaccctctcttctccttgtcccccttcttcccttccctttctcctgcaaggttccgccacacttcaccactggcagcagttggcccaacctcaccttgggggcatcctggacccccggcccggtgtggtcaccaagggcttccggacgctggatgttgacctggacgaagtgtactgccttaacgactttgaagaagatgacacaggtgaccacatttctctcccacgcctagctacctccactccagttcagcacccagagacctcaggtgagaggtcccaagcacgtgtgactgtctcaggcagcagaagttacccgagccggcctcaggcttccccagaggagatgcaggagccgccagcggccacggaggaggaggaggaggaggaggaggaggaggggtctggtgagggcaccacgataagtcctgtaaacttggcacctttcccggaggcagagttttgggccattctcacctctgttccaggcaccatccgtagtggttctctgtctgtagcttccgctcgtctgtgtgggtgatgattaaagcattctcattgcacagttctgtttttaaatacagagtctgatgcctcctatttgtaacaatgggtgtagctcccctgcccatcttggaggtgcatggcccatcagggatctttaaagtgggagcaggaaaggctgctaaaaaaaaaaaaaaaaaaaaaagtgggcttttgggtccctgaaaacatcagtgcccttcttcctggtctgggtgtctccctgagtctaaggggaagattctcaagtcccctggtgatttccaagtggagctgagcagttttagggaaattgagtgctgggtcattcagaaggtaaatgagatcatctgttacctgtacgctgtattaaaatagaaccaggaaaggctcaggatttcagacatttcatcagccttttcactttcccagcttcaatggaggtatatatgtcattttcttttcagcttacacatgtgttcaaagtggatttttaaaaagtgttttagcaatactccttaaccaaataaaccttcggagaacgtcactaagcttttccagagagaagaccctagatgaagttggaaaagagctctggctgactccacccactgtccccaagcattaaaggtgtggccatgagtttacagaattacccacattccagttgccactgggatgaaaagctttgtgctcagagctctgggaatcatgggatcacatggttactgtttaccccaacagcatgctctgtctagactggacctcccagccccttgtgttgggaaggcaaagcttttgtggagtcaggggggagactgagaaaaaatgaattaaccctgtgttgtcatcctcatgacattcctgaggattcaccaggttagaagtgaggacgtttatctttgtgattcataattttcatttgtgaaggccacaacactccccttgaaatacagggcaggaaagagctgaggttcttggtggtgtctcccattcccctggctaatttcagacagctgtggtcaagggattttacttgggatcaacttttccttttttccttgacattaattttagagaagtcatcaagtcatgtgatttgtttagcacataggtttatttatggtttgattttttttaggcagttatattactagattaagcttgtgagggaatgaaaatgttttttatttgttatctacacactcgaaaaagagaaaccagctgcggtactgtcccatttttgtcatcagcaccagtgtccgtcaggaaggcaggtggtggtgcagaaacatgatgcctggctgattttcgtggctaaaggggtaggccttatgttgattgggatgctcccctacagccttacaggtagaatagaaggtgagttctggaagtgcaaagaagcaccattaagtgcatcttctagaagttgtacagaaggactaaagcttatcaagtcaacaaagaacttaccttggaggatagagagagagaagggaccaattatgaggactgacatcctggccactctccttaaaataaacactgacatttttcttgcttgttctctctgtactcaaacctgtggcaaattcatcctagcaacgttatttgacgaggggcatgaacatttatagttgaaactgtagaaagggtcaggttggaggtgtgtaataaaaaagaattacctaggttgccaaaggtaatttaggaagggtctgatcatttagatgagagttctttggggcttattttctgggtaaggctcatctttaaaaactggcttcagaggggagaggggagaacaatgaattggctctattttctctattgggaattacaggaccattttgattcttagaatgtaaaaagcatatcgctaagtaaatcatcctggaggtcccaagtagctctatgcctgcaatcatggagacacaggcagacagataagcttcatggggaaggcatggggcatcctctgtcttgggatttgtatccatggtggtctggtccctgccttttaatccgtcctctacgcttgggcttttctgttaccaaacagcactatcccaggaactattgtctgcctgggaacactcagtagggagacactttggagacaggaggtgatgaacctttttatgtgcagctggtatgatagaaggaaattgggaaaacttgtatgctaggcacttttgtccagagcctgctgtcccatggagaaaaagttttaagcactgaaaaaatttgattaatgtatttaaatgtattatttgaagcatcattcacttgttgatttttacaatcccatgtcttaaaaaggatgaatccatgttattgtattgtaaataatttagatgattaaaatggattgtttaaaaagttttagattatagttttactttatttcagtgatatgttttatgttttaatttatatagaaagtatactttatcagaactagttatcatctttttctgtcagtactctgtattttaggcatttgtgtggggaagagcctgcatgtggcaaaggattaagagttaaagtcacacagttaaattggtagttggctagtggatgggcagttcagttgaattatcttgaatgctttgatccttaaaggtgagaaagaagtaggattcaagccacatggatagagaaaattgacagtcagtttattttaatgcttttactcatcaagactggttcatattgaggggagatatcctcaaaaacttacacgaatcatggcatcttgacatcttacctggcagtggccctgcagtagaaccatgtcctaattggagctgagattttttttttttttttttttttgagacggagtcttgctctgttgcctaggctggagggcagtggtgcaatctcggctcactgcaacttccacctcccggttcaagtgcttttcctgcctcagcctcccaagtagctgggactataggcacacgtcaccattccagctaattttttgtatttttgtagagacaggctttcaccctgttaaccaggctggtctcgaattcctggcttcaagtgatctgaccgcctcgacctcccaaagtgctgggattcctggtgtgagccaccacatctggcctagagctgagatcttaaagtcagaatggaagacaaaaaacacacttggctaaaattgcccttaaaaaattccctaaatctccagcaactgggccaccaaggcgaaagccaggaatcagcttctttcgttgcctccttgtttgatacataggcccaaggtcaggagcagtgactgagtgaggaaagggcagagaagggcttgtggtgagaaggagccaggcggagtcaggccagctgggtgttcctgcagctttgcccgggcggggcagctagagcaaagctcagccagcttgtatcctgtcccctcttcagtacaccacagaccacagaactggggttcagacaggcttgtgagaagttggtttgggggcttgatgggtctggaaggaaaagtctggtatgctcgattcacagacccttgggtgcaggcaagttccttcccattgtctacactgagagagttgatgtgagttcccatgctgttgggaacacttcgattcagcctggttttatggcagttatgagggagttttgttgttatggacagagtggatagttggctcacacccacctgtattaggagatgctaaggaaagccctgtgctctgccgtcagaatatatattaagccagagtaaaacaggccaactgccacctgcaagtggaaaaatgaatgaagaatgaaagaattgactccttcaaaacaaacagcatagagtcaaccctgcttaaaatatccagaacaaagcccacttgttgagcattttctctctggtatcctcacctctgaacactacagagggccccctggtgctcctagaggcacgtgggttgctgaggaggtgtctgaacctgacacccttctaatgtggagggcccttgagggagcaccctgtgttgagaggaggagctgtgcaaccacactgcctagtgaagcacaggtgaagtgctctcttgtgctggccttgaacgcactagtggggaaaggtcttgatgcagctcagccaggccagctcccttcacctgttggtgtctgccacagaaggaaggacaagaggacagagggtatagggaccagctttgttggtgtctgaagactacaaagggatttctgcatttgccctttggacgttttaatagcattctaaaaatccccctctctctagaagataccccaggggcacttgagagaatttctgaccctctctgcacaatgctgtgaaattgtttatctcttaaatcacatacttttcagatgaaacagggtaggcaacttggtgtagtgggaagaagagtcgacttttaattttgcagaaaccaaaaataagttgtgcagaaaccagaaaaagatcttgtgatgtgtggttcgaaatctctgtgatagaaacctcccaggttcctgctggccagatgtctgatcaccgaggagctcagggacctctacggagctgcaggggcagtcgagagctctgttgaagaaatgcttaagcagagaaaaaaataaataccaagcctctgtgaagcccagaactaaggcctttaaaagtgttatcttgtacaacatattacagtttaaaatcacttttgtattttttaaaacaagaaagttgcactgttgcatctgaaactgctcttgattccccgactcctcacctccagagaaaacacttgttaaagccacatgaatccctaacatagtacttgtattaatgatgactcgtagggcaaactatttatgcagcttttcccacgtgaactcatcatagaactttttttccccctgaaaatatcatgggcagagttacataatgaagagacaggaaagtctttagagcatcttccatgccctgatattttagtcttttaggaagagataaagcattgcttcttccctatctgtttaatggaaagggaactgtttctcatgcagctgacaggcaaagacacatcttcctctcccctttccacccctcaagcaaaaggcaacaaagtcattagaagctgggcattaaacaactaaaatatactgatattcctaggggatagtccaagacacacccttaagctggatggacaatggcttttattttcaatagatttgtttttacttggattgaacaggctggcctgtgggtgccactgttggggtgtgtgtgtgtgtgtgtgtgtgtactggttgaggagtttatagaacttgcaaagcagatccaagtcatgtgacagcagcatcccactacatgcttaagtcaaggaaagaaaggtcagggtcatagggtttattttacacaagtcggccacttcccaagagtggcaaaaagaacatggaaggccctcagtgcatcccaaaggtggagtcccttttccaagattttgagatgcttttgtaaatttacatttatagaagttatttatgtgagtttttaaaatagcttgggtgtgtggcatggccagtgtttctccgttctcagaggcttccttggaagcagctgtatctgggtgtatattgcaccctcaatttccccatagcaacatgccaagtacggttgcattttccaatgtctctgggctcatgtgagggttcttttaaggactaggttctatgatggcctttagagagaagaaagcttctgttgtccccagcacttcccagggatgcgggaaggaaaacgccattagaagggaagaaaatgcatgagcaggtgtgtacaaattgtattatgggcggccagacgggcagagttccaatcatcctgcaaatccctgtggaacctctgggccccaccggagtgtcccagcctcttctgtgtccccttctcctcactgtgaaagcactgggccatgggaagcagtgggcttcctacgtattttccctgggaggcccgagcagcagccaccctgctctatatagtgcagtctgaggggcatccagggagtaggggccgtgtcagggctccctcctcactggctgcagcagaaggatcccaaccacccagtttttcagtcagtcccaggcatcatgggcccccgaggagcatgggcactcagtgccacttaccaagcatacctactccaggcagaaggctcaccagagtccaactagagagagcaggtgaggtctcactctgtaagagtgaaagtaagagtggttctcactcttgcaaagtcctctgatgtgtccacctgtagctagctgaaggatgtgtgcttgcatgtggtgtgttttaagaacaaaacatctgcacgacagctacgggcagttcatcaacacaggagatcttgaataataatcaaggattaattaagtttaaagcgtatcacattttgtaccagtgtcagaatctgggggaggaagaacaattaaaaaagaattaggggtttttattggtaaatccaaattcattcctaaatcaaatgatgaaaatatttgtcgttgttaatactctaacccatttaatatgtgcctgtctcttcaaaacactaggaagccctccactcaggttgagagaaagaataagaatttaaatagggaattaaagccttaaatccaagaaactctatcctttgagctcccaaatgagcagcatgggatgaacacataataccatcttctgcaaagaactttctgtttagataaagaagggggctttggtgcgtggcatgggcttggtgacttcacagtgagccctcacccaacccccctatttcctgccaagaaggatgttttatgtttctctctctctctcttttttttttttttttttttagaacttgctctcttcctgcacccagggctttaggaatcagcccgttgcttctctgtagcaagcatgaggagcctctgatgatcccagtcttgggtgactcactgtctctctgttgtgtctcaaggaagggaggtgcagcagcatcctggcagtcagtggtgacatgcggagagcccacgggtccaggcgtcctggtggtattttggaagggccaaatctctggctttagcactttggaaacttgttgatcttccttggtcttctacggctattcattgcttctggggaatggtgacttgtgaatttttagcagccttttcctatccccaaaacccatttgtataagatgggtttgcttctgctgatgcaactacgtctctaaaatgtccatcttacactccctattgcaattgaagatccaatatgtaagagggtggaggaggaagtgaacatttgtgaccttttgatttgatattctggccatatgtttaaatgggggtatgcttctgattttaaatccagccttcccttgtttgatttcttttaaatgttatctctctttcaactgtgttgtcttatttctatttactgctttccccctctcctccttcccaaataacccctcatgcctgttatttgggatgctcttcccaggctttttgttatttttgtttctagaccttattgcgggaagagaatcgtgattgtttggttgccttctcttcatagcttactccatttttgttttgcttgtggcagtttcttacttattggagttcctgagccattatgttcactgattgagaaagattcataaaggctatttttatgtgttttttttttccttccctcctgctttgcctggagctccccatggctgagagttttctcctgtggccgtggtgctggctgtcacgtcaggtgccatgggagcctgctttgacacacagacccgagtcagaccttaaaaatcagggcaaaccatcttgccttgttcctctagtcaccatcacttttgtactctggatttgtcctgcctacctttaatctgtgtctccagcatttatttttttgtttgtgtcatcgggttcctggttttcttttaagacatagtcaactgtgtggacctgtaggtttggggcagcaaccaattccattgttttcctttttgtcaaatccaagagaaaatataccataaggagctagaagattctagttcacagccttttgaatcttcatggcctttgaatcctcatggcctctgaaatctgaatcagttttctcccaggaggtctctgggggctgagctgctacaggggcagagggtggggtggggttgggtgggagaatcatcccggcacttcatcgtgcatgctatttcgggcagcatcttttttttttattttattattattttttttcctgatgcttgagttatgaatgaggatgacctctgcaatcatgatgtctcccatagactctgttccttgttcctttgccagctttctcatgcatggtcctaacacttccatgatttaatctgctgcagaccatagtcttcagccacctcagcaataacttgttagaacattaaaaggaagtaaattgagaacaacttgttgccatcccattttcattagaaatcagacatcttagagatgtcaagaaagcagctagcagctagggggtatggggacctgtcctgctcacactgctgtgtgtcagaccagacctgatcctggagctcaggaccctagagagccctgatctctggaactcttgccacgttgttgctgaggcagctgaagtccccatctcccaccataacaatcacaaatagacagtagtggagccagcatccccaggcccctttttgtgtaagcagaaagggagctgtgagccttgccctgtttgcaggtttcaagtgcctctccctgcctgtacttctccccttcctctgagcagagctttggtagctgttgccaatgcaaagaaatgtaaagcagcaaaagaagacagcaggttctgacctgaggagggaaaccaaatttatcccacaaaggcccattaccccacccccctcgcctcccacccccagactggatccactactggcccaagaatactgatgagaaacctagtctggattgggtcggaagctggaatttggtgctctgcagaccagtgctcaaaattgtggttatttttgaggactcgccttcaatccagaacatttgcgtttcaccttcctcgcccagatccagttaacaaggtagctcatcacttcttgcatctgttgagtgacatgctggattttaatttttattgtggttgtacttggatgcaaggaatatgttttgttcctcccaatttagcgcaccatcctgggaagtgcatgtctcagaccaactccaccttcaccttcaccacctgtcgcatcctgcatccttcagatgagctcactcgggtcacaccaaggtaagggaccctggctttggggtgggcaggggtggggtgaagtcagggcactcccttccctgcaaggcttaatgttgaggaaagccaagtagagaggctcatagaaaaaccaactgaagccagtgtaagcatctcagcatttgcaggcacttgttctgggtcccatccttccttttgttgttgttatgtgtttttttttttttttttttttttttttgaggcagagttttgctctgttgcccaggctggagtgtagtggcgtgatctcggctcactgcaacctccacctcctgggttcaagcccatctttccttttgagttgaggctattatttatttggatctggctcaaataaagagacctggaccgacccacctttagttgcccttttagttggctatttagttagaaatggattcctaggccgctccttaaccagctgaagttgacactacccaggccctatggctaaagtctgttggattttttgcccccaagtttgtcagtagagcacagagttcttttatttatggatggagttactgagccctgtggaaccccttgtgcctctggaataggccccaggaaccatgcagcacagccaaacggtaatgaccaaaatgagaagactccaaaattgagccatgtgcccagcatggtccatttctctctggagcaccatctatggggaggacttgtctggtgtgagttggtctgtttggcctgatttcaggcctttcactgctgccagcaaaagagaaaatgctctcccctaacagagtagaacgaccccctcagctgtttcctctgtggtgtaagatgctgggttgctggaaggtaaagcagaaggggtgggaacagtcagccagggagcaccttaaactatgaataattctccgcaggtcatgtgaggaggacgacgaagcagccatatgccccgttgagctgagaggagatatagggcagagagtctgagcccacgggcgaggcagggggtgagcacaccgccagcagtgcctgccctggcagggccctgtggaaggagctgtgtgtgcacgcgtggccgccactaacccggggacttaggcttggatgtgtctctgtggttgtgcctggctaactcggccttgatggtcgatgcccctaacccagctaaacacccccagtcaagccgagtgccagcactaataaaggcctaaccctaagttctcaccagacggggatcataaatattagctttgtctcctccgtctctctgcccctggagaacttggcttcctcatcctgtggctttatgttgggaagagattgttttcaaaaccatggaaccaagcttctccctatgagaggctggtgccctgggtaactagatggcactcctgactgtagccataggactcaaaccaaacacaggttttcatgtggctgtgtcagggccgaacaaagcctgggaagtcagtagcaagagaaggctcttttttttttttttttttttttggcttgagtttgaaagaaaggctgcttgaaataaaatggaaacaaatcaattgaaacaaacaaaatggaaacaaaatctccctagggatggccacatcaacatgattttaagtctagagcatttttgccctttactgagggtacatcaacatttgtaaaactccacaaatgccttctgaaaaaatccatgtttaaccttaggaatttgttgtggtttctaatcatgcttttccgagtcccccagcccaccagcatccccacccctgagcttgtgtgagatgggcctgttctgggatccccaccctgtgctgacctcccagggctgaggtcacctgaatgtggggccagttggttcccctagcttgtacgttgctttgaacctcgtgtttcccacgagggagggggccccttctctggtcatcgcaaagacctgctccagaatgggcccttttccttcccattccctcctttggtgcctttctcagagtacatggacttccttctgccagactggggagagaagtctccatccccagctcctagggaccatgcagctgacctgctccaaggcacactggcagccccagcaaaatcctggagccggcaccagggcatgtcccacgagactgttaggagggctgtgcatctttgccccttggttgctcattgagaagcagtatagggcttccatgcctgtttggcctcccctggatccctgtagcagctgttaaaagagaacctttccaagctttgcacagtggcagtatcatagccaatgaggtttattactagttgaaaattttccccaataccccgccgtgacgacttgagatagaggcagcattggcaatttttgacagtttttagggatactgaattattaggttggtgcaaaagtaattgcaattataaaaaaaaaaaagaacctttcctgctttttaagcagacaacaatgcattcccctctgctgcccttctggaaacttttctgtcctaatggactccacgactggatcccaactgctggaacctagcaagtccctagtgagcacaacacgagtgaatgaacaaatctttctgctttccttccgtaactcaggccccacacatttcagtgggcctttccctgggtagcaccgttgatgtagatctcttcatatgtgacatgtctccccgcgaccctctaactccactggttagaatggatttgggcaaggatataaagagggttaagggcagcacggtgcagaggaaagggctctgcacccaggattcaggagctcacggccacaactgactggatgggcacagcctggcctcagtccatgcactgtggccaaccttacccttcctaagataaggagtatctcatctcccagagtcctggttcacgtcttgcttcagggagaagtaggtactaagaaggaatgctggaatctgggtaaatttggtggagaaagaatgcctctttgccaaagggcttcctttcccgttctctaacagatttagagtccctcaacttgggttgtccacttaacagccagatgtgacaccaagtaaacccttagctctgagcctgtttcttcatctgcaaaggggacaactgtacccaccaaccagggatgggcaaaggggatcatgtgcagcttcctgttaacttaaaccatgcttcccttgaagggtgagagggaggagcagacgtggacagagcctttgggggcctcagctggtggaaccctctcatcgtgtcctgggtcgtccctaccccccctgcaggaaactggccactgaccctttctctggagctcatgggcatttctggtgaataacctgtcatttcttctttcagccttaactcagccccaactccagcttgtggcagcaccagccacttgaaatccacgccggtggccacaccatgcactccacggagactgagcctggctgagtccttcactaacacccgtgagtccacgaccaccatgagcacatccctggggctcgtgtggctgttgaaggagcggggcatttctgctgccgtgtacgacccccagagctgggacagggccggccggggctccctcctgcactcctacacgcccaagatggctgtgatcccctctactccgccgaactcgcctatgcagacacccacatcctccccaccctcctttgagttcaagtgcacgagccctccctacgacaatttcctggcttccaagccagccagctccatcctgagggaagtgagagaaaagaacgtccgcagcagcgagagccagaccgacgtgtccgtctccaacctcaacctcgtggacaaagtcaggaggtttggggtggccaaagtggtgaactcagggcgagcccatgtccccaccttgactgaggagcagggacccctcctctgtgggcccccggggccagcaccagcccttgttcccagaggcctggtacctgagggcctgcccctcagatgccccactgtcaccagtgccatcggtgggctgcagctcaatagtggcatccggcggaatcgcagcttccccaccatggtgggatctagcatgcagatgaaagctcctgtgactctcacctcgggcatcttgatgggtgctaagctctccaaacaaactagcttacggtgaggactggaggggggccggttgccctagaggagacccacgttctcctctcttgctcccacctccctctcttccccccacagtgcactccctccctctgcccttctctgtccaccccctcctaagctagacaaatcaacctcgtgcctaatggaggaagtgtggaaactttgtaaaatgtgtacataggacttggagaccttgtgtccgccctgctctttcttccgatcccacaggaagtgcccctgcactgtcatcactctcacgaggacgtcacctgtgctaacctgggggaaggtggggtcctttcttctttccttttgagaagcactgaaactcccaagtgtgttcttatcccatggataggaaaccagtgaattccgtggctggcacaccacgagctgtcacgcggcacgggtcataacacatctgggtgtcatcggacacctcacctcgcccaccctgtaggagcgtaaggagcctccatcctcagccacgtgcagctgacgtggctttcctgatcggagggcttttcttttatgggtggcccagcttcttcaagaccttcactgctctgcctcagtggacagtcgtttcttttttgaggtgtgaccttttgttttcatgccttccccttgaagtcatcctgtgttttgtaatcagctgtcaggccaaatgtctgacccgaaagagaatgtatttacactcatgctgcgttgttcagcagcccctctgtgttctgtgtgatttgttttatttttccttttttttacatatatatgcagggaagtaatggtactggtagtgtatgttttctatgtggttcaaatatgaatttcgaacacaccaagccgctaatgagatagcagcttttttctgggacccagagtcacaaccaaattgatttaagaccggacccaagacacctttaacaataggactgaaaggaaaaaggatagggaaaaagcttattaaagaaatgtgtcaacaccaaatgtagaggggaagaaccacaaccaggcataataccaaaccggttccagggggaaacaaggctttggtattccgctggctccagcgctttttctgaaacccgaggctggccagggtgctgtcaccatgcggtctttgattgcagccattcaatgcccacatgcttttccttcttgtttcagaacagcacatggtcacaacaagatattttctttccctccaaagccttttgtctccttgtgcctctttttatccttaggaaaagatccaggtgcttgtgaaaagaatcatgaatgcaacaagggaggctggtcctgttgctgtcgccgattaagttttaaacttttatttattatttatgtctgccgtattttaaataaacattctcgttccttccagtttcagtcatagtgtgtctgtggcattccagtccaaccatgtgacttatttattctaatttgagggctgcactgtacaccatggtgtcctgtgacaccgtgttccagacatttatggaaggaaaacatcccatataaatgaaactgtcatgctgtgtcctccccggcagcagaagatgtgtccttccattgagtgagggtaaccttatgtccaccaaggatactttgagaaagcccctaaggaacaagcctcagtcccacggtttcagactatttattctctgaacacaagagtattggttaattatgttctcagctctccctgctgttgtatgtgtgcattcactgcaagtaacttatatctttttatttgaatgtattttaaagcagtagatagaataacaaaggaatatgaaaaccatggactgaatggaccattttatgtattcagagagagaagccactcatcattgccagaaataccatgtaaaaattggcagttcagaggttgcaatacttagtatagtaaataaataaacggtcaacattgtgcaaccactaccaaaaagtgtgttgtaatgcatcaaaaatcaacacaattttattcactaatgagtatcaataaaataagttcaaatgatggaaaccacactggtattctgatttgtattttgtttttatcttttcatcaaggagacgatctctttatgtaagacttgaaagtgtttagctctttgcaaaattaaatgaaaggcatatacttcacatactgttacatgccttctttctttcaacatgatatcataccttagacaactttccagtcagactctgaagatgtccctcacttttcagggctgtgtactattccactgtgtgcatacacctgctgtgaattatacatacctttatgaaccatcccttacagatggtcactgggataattctttttttttttttttttgtggagacaggatctcactccattgcccaggctgcagtacagtggcacgaacatggcttactgcagccttgacctcctgggctcaagtaatcctcctgcctcagcctcccaagtagctgggatcacaggtgtgtgccaccatgcacagctaatttttattttgtattctttgtagaggtgggggtctcaccgtgttgctcatgctcttcttgaagtcctgggctcaagcaatcctcctgcctcagcctcccaaagcaccgagattacaggtgtgagccactgtgcctggtgtcactgggttaattctaatcttttgctatcacggtactgtaatgaaaaaaccttacatatatgcaattgtccacatatgtgagtacatctgtgaaataaattcctggatggttattgccaaattgccttccatagagttaagagacaaccaaggacagtggaggtccaccagatggagaattgtgagaagaacaaaagaaaaaaataaatattctgccacctcaatatttgaaagcagtgagattatgcaaataaacactgtggtaggatgtggcatcatggattttaagtcaggtgctaaccatttggcagtggtgtgaccttgggcaagccacttaccctctttaggtcctccattttttttttttttaaacctgtgacatgaaaacagtaatgcaccttagagttaattagttgagtcaatgtattttgagcacctaccatgtgccaggcatttaagtactggggacgaataagtgagccagtttctgctgtcacggagtgtacaatctagagagaacaacaccaagtgtagaataacaagggctgtgcagagaattaaaacagggtggtgtgaaggagtgggtggctgctttggattggacagtaagagaaagccactccagggaggggtacttgagtgaagcatgtgagatctggcacaagagcatttccgcagagagagcagctggtgtaaaggcccggaggcagaaaagcactttggtgcgttcgaagaactaagagaaggcctgtgtggtagtgggctggtaggatcgagggagcgtggtggtagcagaaattatggtgctcaccaaatgattcatcagatccccatttcccagccattgcagtcgagcaggtcacatgattagtggctggccaatgggcaataagcagagaaaaacccgtgcatgactctgtgctcctctcttcctgtgtgttaaaccctcaggtcacgtattgaagtgctggagtctccaccatcctgagtctccaagtatgtggaccag

SEQ ID NO: 632 - DNA, 108411 bp, Homo sapiens
  source 1..108411: mol_type = genomic DNA
tgagcgctgggccagcgcttcacacgcactgccataaggagcttcatccaaccctatgaataagctgttacacttccattttaccgatgagacgctgcaaagttgagtaacacagtcgcagcgctcattggtccattgggtagccaggatgggcacctgagctgactcccttaggttcggcccaaggtgccctaagtcagggccatgcctaatgcatttctgcaggtgcccagcactgtgtggcaaagaaagcactaccaaggatggggttatgaaagccggcaccgcaccactggtggtcctggactgcatatgcctccgaatgggagtcggaagggaaggccctggggttcctagaggtctccaaagactaaagacttgtggtggagagactgcccctctttcgcatcctgctcaaagtgcctgccctggccttgggccagcagaaatggcatcgcaaggactccaaaatacatcatagctgaaccacgccgctagcctggttccaccggggcttccaggaccacgcacctttcctccatttctgtgattagctttcccctctaccctttattgatctccgtgacggaaatggttgggtctcgttttgctcagttgggcaaggcgcgtggtattgagttaaggctggatgagtatctgttgagtgtatgaaattttagagattacatgagaaatcaaatgagcaggccgggcgcggtggctcacgcttgtaaccccagcattttgggaggctgaggagggtggatcacaaggtcagttcgagacctgcctggccaacacagtgaaaccccgtctctactaaaaatacgaaacttagcccagcgtggtggcacgcgcctgtaatcccagctactcgggaggctgaggcaggagaatcgcttgaacccgggaggcggaggttgcagtgaaccgagatcgcgccactgcactccagcctgggcgacagagccagagtcggtcaaaaaaaaagaaaagaaaagaaagaaatcaagtaagcaaaaacaagaaagaaagaaatcaagtaagcaatggcccagacatgagaatcatcctattcaaccactctgtttgccgatattaacttgcggagctaagagggccttcatacttcgggattaaacccacccatctatcactgatatctttatcattaattttattatacaagtactgcaggtgcatggtaagaaacttacaaaatacagataaacacaaagacaaatccatagaaacactgatttctaggatatgctggtcaataaaaatagcctaagcgactccctttcacccgccccatctgccacaggcttgcctattgcctctgagtgacagaatcaggctaggtggagtggagtctccgttcccatttccaagtacagggtccgctcccctcaactaccggctcctggttgcctgtgcgcgttcacacctagggctccaggccccgcccacagcagacgaaccggaaacgaaccccatttccggcctgggggcagggcctcgggttcctgcatcgggcctgagcagaactaggcgcgccgcggcccggcacgcgcaggcgtacagagctccccgggggtgccagttcctctccgattcccggcttctgtcaccttcctcacggaccttggtcacggccgcaggtgaccccttagcccagctccagtgggcgggtggcaggtgaggatcagggcctcggcagtccagaggggatgggaccgtgtagcgccacctcggggagggagcacactggctttggcctcagcccggagggaccttctctgggaccgatgctagagtgggcgtggggtccgggcgcggggtcgcctgccacccaagggcgtgtgtgctccgcgggccttgtgccaggctccacgtcgccgcggcccttgctctccacgtctgcagagggctggaagcgtctctgcagcccgcggagtttgcgggaaggggaagctgctgcgaagcgtgtgggaaactacccgctggcgcgcgcccaggcgtccccgagacccccagttccaggcttggtgccagccaggcccccagcaagccccttaacttcccttagacttaattcaccctcccgcggaaagaggttactaatgacctgccctgccaaactcagcattgtgaggctgcaatgcagtgtaaaagcatttgagtcactgtgtaaacgtccgctgttgctacacatactaattgtagagtatatttactgtgaagaccgaaaaagcgtttattcaacagaaagcgttagggtcaaagatgtgttttaacgtgtcattttttcactcttcactacgaaacagtgtagccccaaggaaaaattttcttggacctacggtttgtactttttaatggctacttgaagatatggtgtctttggattcagtcactgttcgcaaattcagaagatagtggcggataatgagccagtcccgtcttgggattggggtgggagagggacaggggaaaagcaaatgaaatattacacagtgttactcattcagttcttacattttgtgatatctgatgggatcttcttcacagttactaaactgggtgttgccactctgctttatcattaaaatgataattactatgcttgtgtctgtgcagctcttcacactttaaaagatgcctatgcaggggtgccactatttaatcctctttattctgatgtaccatctaaaagatcaagattttcagaggttacttcacttggtcgggaagctaagactcaacacagttattgagacactgccttcagagctctttctgcccacccctgcctggcaaccttgcaagaggagctgagaggtgaccagcacaaagaaaagagtattggcagaaagcgctgtgtgggtagcctgtcaccatcaggtactgtcagtgtgatgttaggcaaatcacttggccttctctgctgtatgatggaggtaataataatgcttcaaaagtttaggatgagtattaaataataaggtaaaatgcttgatctgtagtgagtgttcattacatggagacttctgttaatacgtgccacctagatttccactacacaccctcgtgcccttatggaaggaaattttacatgactgcaatttggtaaaagatatgtttacagagtgtctgtgtccaggaaatgaacctgagaaaccaagttttaaatgttgttaggaactttttatttctcaaatacagaattacttaaatttaatatttaaaaaaattttaaacaattaattaatcacattcttgtgcaaagccctcaactggacaaggagaaagtcagatttctttgctgcactgtgatgtaaagcttctgtaagcttatgtaagcttaaaatcctatttatagtttaataaaaataaagccaatgataggagggagtaaagatttctatcacgtacaaatcaagaacagatacttgtgtttttccatttttaattatgaactataaagactacccgtaacacacatgtgagatttaaagatcaagtcaacccagtcttccattaccagcataagatggggaccatttcccagtgcgttgaaacttccgtgtgtccctccccagtcaagctctcctgccatcaccttccacccctccctcactaaagtggctgttactatatcctggcttttctttgtagtttgaccaaatatgtttgtgttcctaacacagaaaaagtgtttggattcaacacttttgtttaatttacatgtttttgaatatacagagtcatgctgtttatttttctactcattctttgtgcaaaattgtatttgtgagatccaaacataatttatatgttagatatggaagagttcactgattttcaccactattttaatattttatgtcctagtataccacagtctacttatttacttattattgtgtctacaggcagtgtttatttccactttttttttttttttttttttttgagatggagtcttattctgccgccaggctggagtgcagtggcacgatcttggctcactgcaacctccgcctcctgggttcaagtgattctgctgcctcagcctcccaagtagctgagactacaggcgcccgccaccatgcctggctaattttttgtattttaatagagacagcatttcactatgttagccggtatggtcttgatctcctgacctcgtggtccgcctgcctcggcctcccaaagtgctaggattacagatgtgagccaccacgcccagcctactttttcttttaggactttagaagaaaggtattttgatgtgttatttatgaaattcagcatcatagcttacactgctcatgtacaggaattcctccatgataggtatctagcagtggaattgctaggtcctaggtactacgaccacatatttattgtctcaaccaagactcctttaagagtgaaaggagacacttaatgattttactgaggcgaagcacgtggctcacgcctgtaatctcagcactttgggaggccaaggcaggaggatcacttgagctcagaagtttgagaccagcctggccaacatattgagtccccatctctacaaaaaatacaaaaatagctgagtgtggtggtgcacacctgtagtcccagctactccagaggctgaggcaggaggatgggcttgagcccagaagatcgaggctgcagtaagccatcatcgtcccattgcactcccgccagggtgacagagccagactatgtctcataaaataataatactaataaaataatagaaataacttaaaccatgggtgaaaaattgaattgttctgggaaaaatcaagatgtatagttatcaaagtgataagataatgtgctttttaaactttactagataataccaagtggtttctcaacatggatgttcaaaggtatacctctttcagctctgttgcttatttttctaatggatcatttagtgtgcttttattaatttgtagggattctttatgtattcttcgtgttaatcctttctcagttacatttgtttgtttcactttttttaggtttttaatgatagaactttccattttaatatagcagatgtatccattttccctttatggtttgtactgattatgcctagtttaagaggctttgcctactctgaaaatatattctcttatattttcttctgaaagttttgaagttttgcctttcacagttaatttttgatcccccacccccgccccgcccgagacggagtctttctctgtcacccaggctggaatgtcgtgcctcaatcttggctcactacaacctctgcctcctgggttcaagcgattctcctgcctcagcctcccgagtagcagagtagctgggattacaggtgcccgccaccacacctggctaatttttgtatttttagtagagacggggttttaccatgtcggccaggctcatcttgaactcctgacctcgtgatacgcccgccccggcctccgaaagtgctgggattacaggcgtgagccaccgcacccggccttcacagttaagtttttaacgtccctgagattgatactgtgtctgtggtgagacaagattccaagtttattttttcccagctgcatgatttgtctacacatcactcaaggaaaatcgtctcttcctttgatgtgtgctacatattcccttgtgatagttcagtcttgtttttttttttttttttttttttttttttttttttttttttgagatgaagtttcgctgctgttgcccaggctggagcacagtggtgcgatctcggctcactgcaacctccgcctcctgggttcaagtgattttcctgcctcagtatcccaagtagctgggattacaggcgccctccaccacacctggctaatttttgtatatttagtagagacagtgtttcaccatgttgaccaggctggtcttgaacttctgacctcaggtgatccaccctcctcggcctcccaaattgctaggattacaggcctgaaccaccgtgcctggcccaatatttcagtctttataccatagatttttgatgtattctacataaataatcatacacgaagaatgaaggtttgtatttttttcttttcagtttttattgtagcttttagttatttttcttgccttaatcctgcccgaggactccagtattaggcagcataaaaatgttgaagaggacatctttatcttttttctacttttaaagagaatgctttaaacgtttcactgttaatttgaggtttcctttaggtttttggtagatacctttgattgcattaaggaagttactttctgttgctagtttgctgacaggttttatcttgagcagatgctgaattttattagatactttcttgtgcatctattgagatagtcatgtacttttatttaatctatcgcattaaaccaacagtacatttctgggattacctgagtttggtagaaaataaatacattgctgattcagttagctaatatttcaagatttttgcatgtgtgttcatgagtgagatgatagcttcccttttagtatggccttgtcaaattttggtctcaaggttatattagccttataaagtgaattgggtcatgtgtcttttttcttctctgcaagaatttttgtactgtaggaattatctgtacggaatctttggtagaattcactggtaaaccctctggaccctatattttctttgtaggaagacttaactactggttatactttttttatggttatagaactatctcgtcatatatacatggttattactagtgtctgctttgcatttgaaccttacattggaataagattagagtaaggaaacccttgaagtgaagaagctattttgctacaaattatatgtccattctcacaaaatcttatgtatataatttatatagatgtagctttataatatatgtatgtcttcccattcataaaagcatcatctaaatcacgttttatatcatttttatttgagcattcctcttgattttctagagaagaaaccctcagatccttacttacaagcattttcctgcatctagattttatttgtgtgaaagcaaaagtgatcatccttgccctaaattattagggctttttattactttggtatttacttaagaataaaatttatttttttattttcttctcttctcaaaagtggtttgcaggtattaatgaaaattttggacattcccattttatcagttctccttaatttacaatttataaagtttttaagctttataatttagaagcattttaccttaatttttattattttggtggtttttctaggcgatgttttttgttattatatctctgataaacagatttccctaaatcttacaggtttaaagcagcttcatcttcacaatagtaagaattgtttctttaaaaagtttcttcacaaaggcaataaaacttttaaaatctgtgagattgaatcagaattagctttagaacctagaattttgttagggctgagggtagatgagacggagggaagatccctttctctcatcattagcttatatcgaaatcaattcttatttctaaaataaaatacgcagaccacgctagtgccttcaagtcctgctgggagacttcagagggggcactgcctcatgctgcctgtttgctccttgtgcccggcctctatccctgcacaggaaggacccgaaggagcagccttaccatgcacagggggctccccctttggggttctagggcaatttgttcttcgggctcccggtgaaacatggcaggaaaaaaaacgttttactccttttcattggattttttattcatttatacttaacaattattggatgaatgtataagggaattagtagctgaccaggctgaaccggaaacttcttcaaaatgtataacttggattatgtactttaaaataatgttttgggaaggctgactcattgggaatactatgatggaagtgttgacagtgagaaaagggtagtcttatctagagatcagctaagtgtcattttttaagtaaaaaaggtacgtgttgttttattctgaaaaaaatcccttatcttttatcatagtctcttagatttccttaacttgaatttgttcactatgagagtaaaactacataaagtaaaagtttttcaagaaaaagaacaaatacttttttacagtttgagctctttgtctcattctttggctggtcctggtttccccactcactagcggtgtgatttcggcttacatagcctcccaaggcctcagtgtcctcatctgcgaaacgaagacagtgatagcagctgtctcgaggggtgttctgagaatcacacaggcatatgtatatatagccaggggcatagtatgtgcggataaatgttagctagttgtgttgtcagcttcagccatcagtgcttagtgagtgtgctgttttcttactgtttaaatttttcatgtcattcgcactgtatcagatttccagagtcaggcagataatatgagctggggcgtggggcgggggtaggggcggacggcatggggaagtcaagagactattacaaattgaagagtcttgggagggcttcatggaagaggagggacttagctgactctcagaatgaagtagtgtttatatggctggaacctcacacctactggaatggctactatgaaataaaaacaaaataacaagtgttggcaaggatgtgaattccaaggcttgtgcactgttggtgggaatgacaaacggttcagccactatgaaaaacagttttttggtgcctcaaaaaaattaaaaatagaattaccatataatccagcagttccttctaggtatttacccaaaatgattgaaagcagggtctcaaagagctgtttgtacagccacgttcattgcagcagcatccacaatagctaaaagatgggagcaacccacgtgttcaacaacagatagctggataaacaaaatgtagtgtatgcataccatggaatatttttcatccataaaaaggaaggaaactctgaccaagctgtagcataaatagcccttgaggactttatactgagtaaaatcagccagtcacaggaagacagttatcgggtgattccacttattttatagtagaatggtggatgctctaggcgggggagatgggtatacgggggaatgtttaatggggatggaattttagttttgcaagataaaaagtgttctggagattggttgcacagaaatgtagatgtacttaacactactgaacttaaggtggtcaattttatgtgtattttaccataatcaaaagcacatggataagaagctggagaaatggaagtctgcgtcatttgaatctataagcaatactcatttttcggttgaggtgaatgaagatcacgctcaggggccttctctctgtctttgctttcagggtcatggaggacgctggcggcggcgaggagaccccggccccggaggccccgcacccccctcagctcgcgcctccggaggagcaggggttgctcttccaggaggaaaccatcgatcttggcggagatgagtttggatccgaagagaacgagaccgcatcggaaggctcgagtcctctcgcggacaagctgaacgaacacatgatggagagcgtcctcatctctgactcccccaacagcgagggcgacgcgggcgacctgggccgagtgcgggacgaagctgagcccggaggggaaggcgacccaggcccggagcccgcgggcaccccgagtcccagcggcgaggccgacggcgactgtgcccccgaggacgcggcacccagtagcggaggggccccgaggcaggacgcggcccgcgaggtcccaggcagcgaagccgcgcgcccggagcaggagcctcccgttgcggagccggtcccggtgtgcaccatcttcagccagcgcgcgcccccagcctccggggacggcttcgagccgcagatggtgaagtcgcccagcttcggtggcgccagcgaggcctcggccaggacaccgccccaggtcgtgcagcccagccccagcctcagcacgttcttcggagacacggccgccagccactccttggcctcggacttcttcgactcctttactacctccgccttcatttccgtcagcaatcccggcgcgggctccccggcccccgccagcccgcctcccctcgctgtgcccgggaccgaggggcgccccgaacccgtggccatgcgagggccccaggcagctgcgcccccggcgtcgccagagcctttcgcgcacatccaggcagtgtttgcagggagtgacgacccctttgccaccgccctgagcatgagcgagatggaccggaggaacgacgcctggcttcccggcgaggctacgcgtggagtcctgcgggccgtggccacccagcagcgcggcgccgtgttcgtggacaaggagaacctcaccatgccgggcctcaggttcgacaacatccaggtgagcccgggtctcccacctccgcagcccgtgcctcctctctgcgtctgtgagatacgcacagtgcccctttagggatggagaaggagaaggccttgttttcagtaattcctaacatcccattgtgagcgcctgtgttcctctgtccctgggtaattagggatctgttggtttccccaacagaacatatttaatggactgctactcagagaggtagaaataaataccaccaaggcagacagttctaccgtaattctctcagtcagttctccatgtcctgtaatccatttgacatttgaactccagttaataataaatccatttctttctttaaaatatggaaaaatatattcctgtaacatataatgtgcccgatgtagaatttttataggttgaataagaaaaatacgcgtgacccaaaaagtaacaaatcacagaaatatataaatgttaagctaaatggtaacatacaaatgttcgatctcactactaatgaaagacaattgatgcagggtttttttcggtgccgctttgccagctggagacctccgtggtcggcgatgcccctgcccaggcctctctcggcccaggttcgcccactaggcctgccgggccgcacctggcttgcgctttggcatatcccgtggcctcggtgactgtgctctcagcccccagcaggtgggttgtgcgagcaactgagtgtaggggtccgggggctgctccaaccgccagcataggagcaggcttcacacggggcttgtagctggaccaggcgtgtggcaagtgactcccacagtggactcctgcgtccaggcgaggggaacaccgtggcgcccgaagagcaacaaccgcgaccccgaagcccgagaggggatgttacagcgtgcacacagctcttttcgacccgcatctgctgccggactaacgggcatcttaacggctctaaacgggcgcattaacagaccactgcttcccgttgagtggggcagccgaagggggtgggggatggagggttacagtgttattgctgtcttggtacctgcactccgcggagtcctgagttcttgtcctgcctccaagaagaacgagattatgccgacaaccagagtgtgaggagggcggacgagttttattgagcacaaaacagctctcagcagagaggggaggcgagggtggtcccccaccgaaagtcaggtggtgtctctcccagtgtggctggctcaggggcttttttgggctcagaatggaggggtgcatgctgattgtgagtatgcaaaaaagaaggctaaaacaaagtcaccactcaaaggtgggcacgacagtggaaaaaaccagttggggaagggtaggtatatgtaaaataggtgaagaggggtaatcaatcagaggaaagtgctccacatgggacgaaaggttctcagtcccttacgtgggtttatccgggacttgcagctaggctttaaactgtcttcagttccagtcaggtttcaccggggaccgcccctgtctgcctaggatttgtctgcctcctgctgccatcacactcgagtcatttccgtttccatttatcaatcatgatctactgtttgttgaagtgtgggaaaatagcctctctaaggcagcccagatgggaccaaaatcagtacaaacatatttaagtaaattttaaaatgcgtatcaaatgtgcatattctttgacccagaaattccactcttaggaatgtattgtgaggacataatcatacttctatacatataccagctgttgagatgtctatcagggtggtttgtaattgcaaagaatctgaaataatctaaaagcccgttattaggaggcttgaatacatttgactcacctcatctttgcaatggaatatttatgtaagtttttaaaatgatgccaggggttagggggaggaagggatgaacaggtggaacatagaggattttaaggcaatgaaactattccgtgtgatactttaatgctgggtacatgttgttatttattttaccaaacccatggaaagtgctacaccaagagtctaccctaatgtaagctgtagactttgggtgacaatgatgtgtccatgtagattcatcagttgtaataggtggaccactctggcgaggtgcgttgatcatggggaagactgtgtgtgtagggggacaggcaatatatggaagatctctatacccgcttaatttcgcagcaaacctaaaagtcctctaagtaataaaatcttcctctgatcattggtgaataataatataaataaattgtaaaatctatttttaaaaagatataaaacagaatatttaatgaggttcatctcatactgttaaatttgaaaatcaggacagaagatagcatgtagcatgcatagtatgataaaatttttataaatatatgtatacatatgtatcagattaaatcatatgcatgtcagttttagtttattgcaaccaaattgtgggacaggattagtagtttccatatggcactgtacatgacggggcgccccacctcccagttactggcctcagatcctgtgcgtgtctgtcttcctgaaactgaaagaaggacctacagccccctttagtgcaaccacttacccactcctgaacccacttacccactccactctcactcctgaacacaaataggtaagccaataagccaatcgtatgactgtgactattgctattgaattgatagatggctgagacctaggagtggtgaattctccaggaaaagaaaagtgacatactagagaaatgaagccaattaattttttcagataactgaagtgtaagcctatagacatccgtattttgggtgttttacgggcagtctttccagaatgttcattgactaatttactaatattcatttactatacttattgtgtgtttactcttgaccaggcattggtctaggcattcttctctaccctcttaggcagaatatactgagcataatttaacctttgcaggatctttttaatgaataccaattccggactctgatgtcaggggtatttggatgtgtgggattggatttatttgtcactgaattcttacctgtactcccactccctggtcttgtctctgtatcctgtccccccaagatggctttcatgttctgctccatgtttcttcccttctctctcggggtctttgtcctctctgctgtaaaattcctttaacatctgtgggtctggcctttagcactttctttcaaaccctctgttgcttgccttgccgtttgcttctccctctgactgtaactcagaggaaatctgaaggttgccacaggaaagacttaacctattgcttcccaactgggtgctgcagtccaacggtcttaggtacatttggaaagggggagaggtgtttcactttggttgacaaaagggctggggtgagcatatgacatttagtgagtagggctaagagtactcagtaccttgcagcgagctcaaagctttcaaggaatggaaaacacctgttcctcaaaaaagcttaaaggtctctggtcctgtccagtttctccttttatgatgaggaaacagatccgaatgacttgtgtgttcaccagcaagcctgccatgtcccaggcatcctctctcctgacacaaaggaaggtgtaatgcctacccgccagcccagaccaggacagacggcctagacaagggaaggcagacctgcaaatggataatttcagtgtcctgtggctcagtagagatccaggcagagtcccatgggcgtgtttaccctagataatgcagccacaacactgcagagccagtgccagaacacaggtcctctttgccttagttctggcctctttgtcttatgttgtatttctccctaccatagaaaatgactaattgtatttctctcagaaggatctctgtttaagtcaaagaactagaaacagcactaattatcagggaaatgcaaatcaaaatcacaatgagatatcatggctgttaaccgaaaactctggagacagcaagagttggtgagggtgtggagaaagggacccttgtgcactgttggtgggaatgtaaattaatacagccattatggaaaacatggaggtgcccgaaaaagttaaaaatggagctaccatatgatctaacagtcccccattctgggtatgtatccaaaggaattgaaatcgggatctcagagagatgcctgcgctccatgctcactgcagaattatacagtagcccagatagggaatcaacctaagtgcctatcgacaggtgagaggacagagaaaatttggtatgtagtggctcacgcccataatcccaacttctcaggaggctgaggcaggaggctcacttgagccatggtgttcaaagctgcaatgagctatgatggcaccactgcactccagcatggataacagagtaagacctgtctctttttaaaaaaaaaaatgtttttaaagaaaagaaaatatacacaatggaattctatttagtccttaaaaaacaaggggaaaccttgccatttgtgactatatgcatgcacctggtggacattaggttaagtgaaataagccagacacaaaatgatgaataccacgtgatctcatttacatgtggaatctacagaagtcagactcatagaagctggggcctgggggtgtgaggggcatggggagatgttactcaaagggtacagagcttcatttatgcaagaagaaggaatgctggggatggaatgtacatttaacatggtgactatagttagtaatactgcgttgtttacttgaaatttgatgagagcagattttaagtgtcctcaccaccctcacacatatacacacacacacagtaactatgggtagtgacggttgtgttaattatttcgactttggaattcagtacacaatgtctatttataacaaatgatcatatataccttgaatatatataatttgtatttgtcaactaaatattctaaaatttaaaaatatgccttttctatttacccacatttaaaaaaaaaaaaaaagaactggaaatcaaatggcttaactttagtgttccataaagagtgagtagctcagtcttctccagggtcccagaagttgcctgatacgtagacatatccctgatcagtatgtgagcttaggaagagccttgaattagaagaattggtttcaaattgttggtttgccaataacctgtgtaacctaagggaattcattgaacatctgtggctctattttcttctctgtaaaatgaaaggttttggtaagtctgtcagttacgctgtaggttcagctgcattaacaaagaaagccaaaggtatggtggctggaataggatacatgtttatttccaggtggtagaacactttggagatatgtgggccagcactgtggattgactctaccttcctcaaccaagtccaggaagctttttcccattgctgtcttccagccatctggaagagggagaggctggagagctctgcagtattccttttatgatacgtcatctggaagacagtgtgtccactcacatcccactacctagggtttagtcacttggccacaccaagatgcaaggaaggctgaaaatagtctttaggtaggcgaccatgtgctcaggcaaaaccaaagttctgttactagaagaaggggagggccgggcatggtggctcacacctgtaatcccagcactttgggagtccgaggtgggtggatcatgaggtcaggagatcgagaccaccctggctaacacggtgaaaccccatctctactaaaaatacaaaaaacagccggacgtggtggtgcacgcctgtagtcccagctacttgcgaggctgaggcaggagaatcacgtgaacccaggaagcagaggttgcagtgagctgagattgcaccattgcattccagcctgcgcaacagagcagcactttgtctgaggttaaaaaaaaaaaggggggggagatcagagattggtggatggctgagagtctcctccagtgagtccttccagcaccaaaagtcttgaatctggaatccataattactgccagccttgagcctttgctgataactgaattcccactgctgcgtatgtaagaattatccagcttgtaagtaggttcgaaacccattttctagtaaattatgttataaatcgtaggggagtttttagaataaaccacaaagggctctctaggtggaacttattataaagagataatgttgtatattctgtctctcacacacacactcacactctatcctgttattagtaatttagcaaaataatgttgggaaagcatatttgagtacagtcttttttgtggatatattttcgtttctcttgggtaaaaacttaatagtatactttctggggcttacgataaatgtgcatttagctctataagaaatagaacagtttccaaagtgggcacagtatttcatgtttccgtcagcagcgtatgagagttccaattattttgtatccatggtatagtcaacttttttcgatttttgcatttctctgatgactgaggttatatagactacttgatacaaaggatctcatgtattaatcctttgatatgtagacggtttgtatatctttatagagcatctcttcaaacgttttctccatctttcaaacttcggatgtttgtcttattgttactgtgttttaagaattctgtaaatatcctggttggaaatgagctatcatacacaatagatgtgttgcaattttttttttttttactattctatgtcttgtttttgcaatttcttaggtgtcttttgaagggcagaaattttaattttggggtgcaggtatactagctacagattctcgcagcttttattagtttcaaaattattacttttttttttttttttttttgagacagaatcttgctctgtcgcccaggctggagtacagtttcacaatcacagctcactgcaacctccgcctcccaggtttaagtgattctcatgcctcaccctccagagtagctgggactacaggcacgcaccaccacgcccagctaatttttttttttttttcttgagacacagtctcactctgtcactcaggctggagtgcagtggcacaatctcagctcactccaacctccacctcccaggctcaagcaattcccctgcctcagcctcctgagtagctgggattataggcatgtgccacgacacccagctaatttttgtaattttagtagacacgtggttttgccatgttggtcaggctggtctcaatctcctgacatcaagtgatctgctcacctcagcttcccaaagtgctggaatgacaggagtgagccaccacgcctggctagttcttgtatttttagtagagacagggcttcaccacattggccaggctggtcttgaactcatgacctcaagtgatctgcccaccttggcctcccaaagtgctgggattacaggcatgagccaccatgcccagcctcatcttcgttattaaagtttatttttgccaaatatacaacatatttacagtatgtagaattctaggttgacaggtttttttttttttctttttagaccttgtaagatgccatcccactgtcttttgacttgcatagtttctgatgagaagtctgtagtaattcttatcctcgctcctctgtacctaattgtatatttttcctctgggtgcttttatgatttatccctggtttttcagcagtttggttctgatgtactttcacatgggatttatgtttattttgctcggcattcattggctgttttggatctgagactttatcatttttgtcaatttggggaaatttggggtcattatttcttcaggtattttctgtgttttttctctctcctacttctggaaactccaggtatacctactgcttcatattgccacagaagctactgaggatctgtttttgtgtttttattttgcagtctttctctctgtggttaagtttagaatttctactgctgtccttaagttcacttatcttttcttcagactttttagtttgcagctaatcctattcagtgacttttccatgttttttacctctggaatttttatttggttctttttcgtatcatttttcttttatcattttcaagctttactttaaactcttgagaacatttataagaggcaccttaaagttgtcttctgagctgggtgtggtggcatgtgcccatagtcacagctactcaggaggctgaggcaggagaatcactggagcccaggagtgtgaggccagtctgggcaacataggcctctttaaagaaaaaaaaaggaaagaaagaaaagaaaagaaaagttcttatctgaaagttccattatctatgtaatatctgcatctatttttatgtactttttctcttagttacgggacacatgttttacatgtctagtaattttttattagaaggtggacattgtggatttcaggttgtgtgtctagctttttcatcttcctttgaaaagacttgccctttattctgacaagcaagtaacttatttacagatttagtttcatgtttgtttttagactttttagaatgactttagagcagtagcttctacttttgggtgacctttctgaagtctgtactgaattccccttctgttcagtgagagcactaaacatggcagacccacagtcagcacccttcagccctgtgtgagctctgggcttgccagctcacaggactctgtccatggcagacccacactcaacaccccacagccctgtgtgagctctgggcttgtcagctcacagcacctcatcctttcctgccttcagagctgcactctctgcacatacagctgagtgtcagcagtaaactcaagggctcccacacaaaccctttctctgcttagctccctcctttctagatctctggatataagaattatccagtttgtaagtatgttccaaaaccattttctagtaaattatgttataaattgtagctgggtttttagaataaaccacaaaggattatgtaggtggaacttattatatagagataatgtatattctttctgacacatacactctcacactttctctgtctcccattgttgttaataatttagcaaaataagaatgttgggaaagcatatttgagtacagtctcaagctcatcagcccacccgccttaacctccttgatgtcccaaaccctgcttgggattctcctcctgcaatgtggtccaaaaagtgccattgggttcaagagttcaactcatgttttccttctgttgggtcacagtcctttgctgtgtctgaagacagttgttagatttcttctgagcaatgttgcagttgttcacatcaagacagtccagtcccagttaccctgaaatggacagaagcaaattactgctgctttttattcattcatcagttggtggacatttgggctgtttctaccttttggctgttgtgagtaatgctactgtgaacattcacacacaggcgtttgtgtctatgtgttctcagtgatctgggatgtatagctaggtgtggacttgctggattctgtggtaactctgttcaacattttgaggccccgccagacagttttctaaaatggctattccatgttgactccccaccaatgatgtggtgtgtgagggttccagttgctccacatccttgagtttgggtttgggttttaattgttgtggtttttttgttcaggtggtctcatttttccctggagtaagcaaacactggatcagaggatagaccctgccaggataaacaggcacctttctgcattggcgatgtggcagaaagctcagcgtgttctgtgccaggtgcaggggctgctgcctttcagcagcgctaccccgtgagcatttgtgtctttgggcttcccagacagtaaggcccatacgctttcagtccactgctctggcttctgttttgtctttcaccatcaaaatcaagaagggactactgagactattcccccattgcaggaaaggcagccaggccctaaccgcctgtcagccgtgagaacagccacttgctcctccataaatgcacctgaccaggagaatggggtggcgacatcacgatgagtcccagattgtgatatattcatgtgtttccttcgtgttccctgaaccttgccctggataaagtagaccctcactgaatggcttgctggtctgaaggaatcattggttctagctggattccatcccaggtgtagtagcacagctctctagaaagccctgggggaagttccctccccctcccacctcccctgcacagtaacggctagaggagatgcagtacaagcgtctccacctccctgcgctgtcaccaccttcagttagccacacagcaagggcgaggtttgtcctaagacgcttgtcacatccttggccctctgttggtgggatatttgatagtcatgcatatgctagtatctcaggaacttgctgtggtagctaaaatattaactaacagagaattttaaggacaagagattttcacagcatggtctcattgataatgttgtggggatggaggagttgaattggccctccgtccctggcattacaatttgattttgctctttacccagctcgctgcccccctggctgagatgctctttgtctgagacgagttgcatttttgcagagctttatggggccctgtgtctgaactcttttattttgccttttaattattgctgctagatcagttagctgattttgtggatctggtatttgaagtacttcaccttatgctctgaaagcagaaattatacaactgctgcccctaggtcttttcctcaatgtgagaaaacgtgaggctggcctctgcgagcaccaggtttagcacccagggaagagacagacctatgacctggagccacccagccccttctgccgcaggctgttgatctctcctggtagaagggaggcagcagagcagagaagcaatgtcagcagcttttctgattctcttgctctcatggtctagattctgttcttcttttaagtgtcactattttgaaagatagcaaaagattgaaataaccttgcttcttaggagaaacaacttctatgcttttctttcccccgctccccccgccaccgccccgccgccaaaaaaaaaagggtaggagaacaataggaagagatctgagccagcggtgaagtccaggcagggggcacgcaggcttctctgcaccctcagtcactgcgtgctcccagtggcccgcctgcagcatgagcatcagcttctctgtggctgggaggcagctttgtgctgagatggagagatcttggctttctccaccccccatcttggggttgtcctagtttgagtctttcttctgctcacccgagagactgcagggactttgtgctgtgtccctgtcagcagctgctgcgggccagacgcccagagcacgtgtcagggaagatccagccagctccggctgcttgctgtctccaggcatttcagggacctcagagccactgcttcctcctcccaggatgctcactgtctctggcatttcagggacctcagagccactgcttcctcctcccaggatgctcactgtctctggcgtttcagggacctcagagccactgcttcctcctcccaggatactcactgtctctggcgtttcagggacctcagagccactgcttcctcctcccaggatactcactgtctctggcgtttcagggacctcagcgctgcttccctttccccctgggctgctctatccccccagctgcccctgcctcaggtgtttcagggacctcagtgctgctgccccttcccaggtgcctttcctcagtcagcagcacccccagaaaggagagagatggtccagggctgtgtcctggtcccagctgtgtgtgagaggcgtctcctgccgcccgtggagagcatcgtgtcctgtgagcagcctttacttaccctggactctccctcggcctgcggtgcagccaccgaaacagcactgaggcctgtggactgtgacagttttctctgcactgttgggatgactagtttgtccccatacaacagacttggtaacttcaggcccttccctggggcccctgaactgtgccgactcccgagggtcatgaaggctggctcgcccagcatctgggcttgacactagctgtgagattgctccctgctcagggcaggtcattggcacatctcttctgtccccaggccacacaaaagcacctgttctccctccccttgcccttctgtgtcttccctttaaagcaagtggcatgcttcagattccacgtccagtgttcttcagcaccgtctaaagatcgttctaatcagaggagtcaggtcaggagtagaaacggtcccgtgcagaggcaactggattcttccctggcttgcagcatgaagtgcgcccagcagctcctggagcaaggcctggctcagcgaggctaccgaggacctgctgtgaaagggggtctcagttttcctttggcttggctggtgacctcagcactgaagagagggccattggtaatttaacttctttagccctagccctccaggctttcctggaggtccaggcaagcatggaggcattgatgagatttgggaagactattcaggcctgcctgcaccagcgcgaggctggccactgtgggtgcagcccctggtccccagcagtgtcaccttcatgctcctgggcctccctaggcccctcacctgaggcctctctgctggcttggctttgcctctcactacaagcctggtagtaggcggtaggacttaccgtttcctcttcagaataaagaacatgctttctgatcagtggtgaataaagatataatttttaaaataaaaagaataaagagcaattctaaaattatgcattttattaacgattgtgctaatttagcttctggttaattgaagttttacgatactataaccgttacttttacctccacaagccagtggagaaaaaagaaattgtgtttagttatgggttctggttagctgagtttagttgacattttattgtcttgacatatttttcttctattcttcccagggagatgcagttaaagacttgatgcttcgctttctgggtgaaaaagctgcagcaaagagacaagtcctaaatgccgactcagtggaacaatcttttgttggattgaaacagctaatcgtaagtgacaatgtgtttgatttcagtgttgttttgtgataagtcctgcctgccttcataatattttctctagaagtcaattattttgaatattattcaaagctcttgcacataagtagaattttgttggagtagatgccagtcctgtgcaccaaaaagcatcatattaatacatggatacttttaagcctaattagttaaaaagccattattggaaatgatcaaattactcaaagcagtgcatactttgattgagtttgcttcatcatatataatagagataaatgatttgtgttcattttttaaatatattgcattttctgcattttgtgtagaaagtttattattgaatgggtgaatttctgaacatttttaagctttgtcatgaattctataagtaggtttttaaaattcatggctgggcgcagtggctcacacctgtaatcccagcactttgggaggccaaggcgggcagatcacaaggtcaggagttcaagaccagcctggccaacatggtgaaccccatctctactaaaaatacaaaaattagctgggcatggtggtgcgttcctgtaatcccagatactcaggaggctgaggcaggagaatcgcttgaactgggacccgggaggtggaggttgcagtgagccgagatcacaccactgccactccagcctcggctacagagcgagactccgtctcaaaaaaataaaaataaaaaaacattagtactggatcaccattgctgtacaggttgatttgtttccaatgaatttataatcttaaagacagctgtaattgcgttgggtagcttttctagattaaggagaagatattggaagtttgtcgcgtatgtttccttcaggaatcctatggtagccatggggtaagtactctgaaatgagagccccatctcacaccgaatctcagctccccagtgttgtctccttagggggctgtggaattgctctgctagctcatccacacggttgcctagagtggacttagcaaagccatgctcccatgcctgcatgcagtcaagttagtgggcacactttcttgaaggggtttggagagtgaggtccttgattttgggaataagtcccaccggctgtctgaaactcatgttgaaatgcgcccttatcctgactgtatttcagcggcacatggtccagacactctccatttgggtgaacaatctggaggacatgtattcacctttcaactttcaaaaaagagaatggaatttcctaatttacttatttttctaatagttccccatcttgtttttctcaattgttactaattcttctgcaccgggcttcagatttcaccaatttttttttttttttttttgagatggagtttcactcttgttgcccaggctggagtgcaatggcgtgatctcagctcactgcaacctccacctcccgggttcaagtgattctcctgcctcagcttcccgagtagctgggattacaggcgtgcaccaccacacccggctaattttttgtatttttagtagagacagggtttcaccatggccaggctggtcttgaactcctgacctcaggtgatccgcctgcctcaccctcccagagtgctgggattataggcgtgagccaccgcacccgaccagatttcacctattttaagcaaactttagttcctaaagatataatagttgagaagtttagaaatttctggaggattaaactttgcagcccattgaaatgacaggtgaaggttagcctgtgaactaaaacagaaaatgagaatgttttaaagtttattttggagtagcgcgtggctcagtcccagctcagaggcaactgtcttttgtgtgaaaacagtaatatgtaaatcacttacttgcaagaagactacagtgaagttcagaagaaaataatcccagttccttttttgttacatcacctctgcctctgtatttgaaagtgaggtatagcctgtccccattctgccagaaatgactgatgtttgtgaggctgaaatcctgagccaggagaggagtgatttcttgatctttaacaggagcatttaacaaagtaacaaaattttttccttaattgactagttctcttgaattcagacaaatccttattatgtgtggtcttgtgacttctgtgacactttagaagctttcctgggttcagtatggattggggactgcctgctacgctgaccgggccacctggaacccctttgcctggggcctggctcccggctgtgatgacccagatcgcggttgtgtgagggcctttccgaagcatgggtgggggctgtactctgctgtgaggtcgcgcagggacatcgtgccctgggttcctggattttctagtccctctcttctgattttaaacttctctttgactttctactttctagtgttctattgtcagcagatctcttgcttcctaagagagcctaaaggaaaaaatatagaatcctccccattttactcaaaagtcagtttcttatattcttctcgatcttgatttttaacttcctttgatccctgatctttttcccaaaaaaatctttttttggagttttgcccaaaaagcctgtttttgagaaagtaccgaacattggcaaagcagccttagttacttggattttatcctgacttcattatatgcatgaactgggaggtgacatgtcatcagtgtcaataacaaatgctgtaacttgggggagacagagccaacctacaaaaattaaaaatctgtaataaacaccgtgacagtcaggaagcgtgtcttgttcaccagtgcatctgaggacccagcacggtcaggcacagaatgggtacacggcgtcttcttgagtaaataaagggatgagggaatgaatagataagagaacccccagtcggtaagctactcttttgataaagaagtagcgtcagaatgttgggtttaaagaaatagagaaggagctcatacaaaaggatagagtggggggcggttacgggggagggggcgcaaagagtgaggagatgaaaccacaagaagattagtctggagaaagatggaacatttcttcctctgcaatgacagaaaaggaaaggaaggatttgaaaggaatgaaaatcgaatccagcacattttcaaactgtgattctgagaaccctcgggttccagggagggaccttggggtgactgggcatggcctgcggaggtgacttggtagggccagtgtcaggcagagcatttcagcagggtctactttatgtagaagtctctcttgagatgtctttttttgggggggtggggggaaaggaggatgaattttactatttaaaaatttgaaaaactaacatagtccaaaatgcccgctttgtagattagaacactaagatctacaaaggtgtagaggttggccccaaacaaatgtccttgctcctgttaccagtaccatccctactgccccatgtcccttacacagtccgcacagcccagcaaaaagcacagttgctggtgttggttttgctcattgactacctcccaccaaatgacttagtatttctgaaccgtcggatctacacaccgtgggaattacgcttttcaatacagcttctaggactggattgtatccaggggtaggatttcccatgagaagaccttatatctgatgggattcaaacaaacaagttctcacttgtgtttcttagtgtattcattgagcaaacacatattaagcctcttctctttccagcaataacaataaaggttgctaagctagtgctcttgctccgtgaagttctgccttcttaaccatttatgggatttactcagatttagaagtgctattctattatttttaatttacttattgctgacttgaagctcatacactatttttaaaagaagtatatattccagattcacaaatttattgtaactcttatgattcttcatcagtgtcttcagacacagacacaaattcagctgcactcctaacccatggcagtgaagtttctcttttctctcctcatgccctgaatccacttcccatagggaagctgcttgtactacatcttgaataccagttcccacaaccctgcttctgtaactggcgggaatcccgagagctccagcatgaatccctcaggcctcttgccccagagcaaagttcccagctgttccctgacttgcagagactgaaggacccttccagactcagagaagccaaaccttccccagagacgcttccctctcctccttcctctgcaccacgctccccaagctgtggaactgtcactcacatggtcacgcaacatacacacacaggtctgtactcattaactcggagtaagcgcaaaaacccaggcagagaccctctcctaaaatagaagcaggaaattatcttaggtgtaggtgtttgctgtctgaatcctctggtagcctgtgaaccactggaaactatgctccccaaattgcctttcttccccacgttctttaccgtatttacagaagcgtgtcctcaaaaaggtaaacaagcatcccttgcttaccttcacacatcacaccaagtttaaatgtgagtcaatgtcagtcgaatgcttctttgagtttcttttaccaaagtgattctgtaattatttctatgattagaaagctttggagaggagagagatggagatactcttttttaaaggggaaaaaacagctaatttgtaagtatctgtatcctttataatttgctaatgcagttacggatctccagggtggccatttccctggcccatgctctgttcccaagggtgtgggcgtggccccttggtttggccatggggaagctgctgtgatgtatcctcttgaggcaggaactgaactggcagcatgacagggctttataataatgggtttaaaaatcacacacaaagccatgcatgttaattataattaattttttctacaggctattttttaccctctttgatcgttcctgttattaataaatatatacaatggtttgatgtgtttcatacgttggaaatacttgagaccatcagaaattttattaacaggcctaacaagggagcttacgtaaggtgaaaaatgtatttatgaaaggatctttaccttgccctggtattttaattctagtgtgtcctaaaataattcgtgttgtctttaaggcagccaggaaagggtttttgaattatttccctaagttatgtcagagtttcctaagattgtaatttacagggaaatggatgtcacagcctgggagaaggacgtgttaatcactttaatggtatcatatgtagaggtaataattccctttgagtcttagatggagaaaagttatgtacatgccattagttacttgagtgatttttattagactatttttctcatcatttggaaattgtgtaatgcctacgttcagtttttcaaatagaccctgtatcgtactcctagcaaaaaaacgtaaaagtagtttttatctaaaatctttatctcatatcagactaacttcattattagaattttacatgtcatgtacagtaattatgagattttcataagatttctttcacaaagtttaaagttttatgtggtatactttagattctgattttaaaaatagtttctttgcttcatatttctgacatctatcattgaaaatagaggaggggggaggccgaggcgggcagatcacgaggtcaggagatcgagaccatcctggctaacacggtgaaaccccatctctactaaaaatacaaaaaattagccgggcgtggtggcgggtgcctgtagtcccagctacccgggaggctgaggcaggagaatggtctgggaggcagagcttgcagtgagccaagatcacgccactgcactccagcctgggcgacagagcaagactccgtttcaaaaaaagaaaaaaaagaaaaagaaaatggaggagggccaccaggaaggggaataaggtggaaaataataagataaaaatagcaaaaaacacactaagaaaataagcaattataatttcaaatagcagacggcatgcgatcataagaactggctctggctctcacagtagccacagtcacatcccaccttggaaggatgtgctggttcctcctggccggtcgtcccctctccagcatttgtccattaaacaagagccctggctctgctagttccacatcacctcttggacaagtctgaagatcagaatgctgaggctgtgctctgccgaggctggtaaaaataaacctccaaacacgtgtgcttgacatgtgtggccaaggaaatgtctaccgtgcctccagttggaggcttgtaccaggagaaacactaaagaggagggaagcggacaagcctatcacactggcagcaccagttagtaagggtaggcagcacacattgttgattcgaacgtgaattgtcttgcagagcaatttaacaatagctaataaagctgggcgtggtggctcacacctgtaatcccagcactttgggaggccaaggtgggtggatcgtttgagcccaggagttcaagaccagcctgggcaacatggcaaaaccccgcctctactaaaagtacaaaaattagctgggtgtggtagcacacgcctgtagtcccagctacttgtggggctgaggcaggaggatcacctgagccttggaaggttgaggctgcagtaagccatgatcgggccacagcactcctgcctgggtgacacagtaaaaccttgtctcaaaaaaaatttaaaaaaaaataataataacaataaagtacatgctttgtataacttttgactcaacaatcccactttcaattatatactttagaaaaacttgtacatgtgtgtaaaaagacattcaagaatgtttgctgctgtattacttatgttacttagccaaaaattctattaaaaatcttaatattcaatatccaaaagaagagaattatgttatatgcagttgatcgggcagcacagtgcgacctgaccaagctcactctgtgccgccctggatatcccacacgtgcacctgttcccacacacgctcctttcctgccctgcgcggcccgctgcggcacagagctatgtgcaccgtggctcctgagccctgcccggccaggggcagtctcctggcggctgtgatcctcttcctgaggctgccacagctgtcttgcagcccagtcccctctggtgccatgccctgggcacgtcactgtcccttgctcacaactttgcaaaaagttaagactctcttcagaaactcctgtgaccatgcagtagccatcatgtcctgccaggcccccgacaaaggatatgatagcaaagcctgacctcagcgaggagagacagttatggtctcagttcatctcctttggtgtgaacaaaaatattcctgtgcctagaaatgtttttgaaatacaaagtaaactggaactatagacaaatattttatattctcttatcagaaaaaatcaccatttgggaaagtataaattgtaaatggtaaataatgtgttttcttctctttttttcctttaatgtttttctaaatgattatacaaagaaaatcatctggctgggcacaatggctcatgcctgcaatcccaacacttttgggaggctgaggtaggagaatcagttgagtctaggagttcaagatcagcccgagcaatatagtgagacccctttatctacagataatttaaaaattagcctgatgtggtggcacgcacctgtagtcccagctactcgggaagctgaggtgggaggattgccagagcccaggccgtggaggctgcagtgagccctgatcgcaccactgcactccagactgggcaacaaagcaagactttgtctttaaaaaaaaaaaaaaaaaaaaaaaaaaaaggggaagaaatgaaaaaatcctgtttctattccctctactgatgcatctgactctcacaccacatctaaattagagatgaaggggctctctcagtcacgtctgccctgaattgcagtgggggctctccccagctgaggtgtgaggctgggtctgggccttgcccctttgctccccactccgtgtcccccagcaggtctgccagcgccgagccctctgcgcctccacctgggagatgcaggtggaaagggctgcccagactctctctgccacgtgctcttttgtgttatcgtctcagggaattgggttgttctgactcctagaaaattggctctcgggttggtgtaagtttgtgtagatatgactgcatgtcatttatagaccaatcgatattaaccagtaaattgctcactctaatagtgcacacttaatcaatagcagcaattatccaagtaaatctttcatattcagtcatctgtggaaaaattatattgggagaaaccgtaacaagagcataaacatttctgctttctattttcagtcaggaaagaagccactttttaaaagatttacatttcccaaagaaatgaataattaagatggtaggcatttgctttatttttaatagttgtgatctagtgtgagacatagaaaataagtcttagaatatgaaatcatggcaaaagctgaaggctttttatatgatatgttttactatttttaatcatttatggagtactttatgtttgcaaagcccttgcaaataattttattacacatgtaaatgtttgattggtggcgagtatctatacatagtgggtataaaatgagatggaagcctttactgtaaaatatgtcttacttgtttaaaaaatacgtaagtatccataatcagatcttcccgttgatatgtttttgtgcccacacaaattcaaattgcctttgaggtccatcaaatagataacaaattgagggccaggcgtggtggctcatgcctgtaatcccagcactttgggaggacgaggcaggcagatcacgaggtcaagagatcaagaccatccaggccaacatggtgaaaccccgtctctagtaaaaatacaaaaattagctgggcgtggtggtgcacgcctgtagtcccagctactcgggaggctgaggcaggagaatggcttgaacccaggaggcggaggttgcagtgagccaagatcacgccactgcacttcagcctggccacagagcgagactccatctcaaaaacaaataaaatgaaataaaaaacaaattgagttcactgggctttgtgtggcatcacagaattgaacatcaggagattccatatctactgtatcaaaatccttttgtttttcagaaaaacccaaaactttgcttatgctttagctgctatacttagtagtaacttacaccttccatacttgttgtgaaaatgctgtattatttcaaccagcctgaatttggttcctgcatgtcaagcactgttctaggtacagagactgagggcgtcactgtgtggagagaagtgacatgcacacggttgatttctgacaggccaggacatcaaagcgctgtctgcatgagtgctgatccatcattattttttcattcacaaaactcttttttcctcccttcacaaatagcaagttcctgtatctaaaagagaaaagaaaaactgaaaaaaagattgcttatataaccactgtccttttacattttagtgtatgtgttatacgtatgtgtgtgcatatctatactatacatagtgtgcatgtatgaagatggagatacatgtttgtgtatatatgcttaggcacaaaattcatatgcttctatcaatttgtgtctttttattatgtattatatatttagcatttccccatataaaagggtctttaaaaacattttaatagccacataatctgaagttattgtaaataatcttaagatgaactgtcttatacagaattctacatatgtgattgtttctttaggataagtcttaggaggagaattctgaagtcaaaggctgttcataaatactccccattgtcgttcagaaggtcattccaggttatgttttccacagcacctgagtgcactggctgtagcatctccttgcctatcctgacttgtatctttttttaaaaaaattctaatttttttaggctaacaatgacatttgctttttatttgttttgctagtgaagatcaactcactagtaaattataatttgcatttctttgattactagtgtggttaattaagcattagtttattcttgtactgtcttcttgtagtgctatgaatttactgtctgttccacaatttttttgcatgccaagtgccacactaaagaaatgcttttagaaattaaaaagcaatgcattagatgcggccactgccccaaggagctaaaggagaaataggaattaagaataggaaggtttcaccatgagcaggaaaggcaccattaagatcaggtttgaggctggacatggtggctcacacctttaatcccagcactttgggaggccgaggcaggtggatcacctgaggtcaggagttttaagaccagcctggccaacatggtgaaaccccatatccactaaaaatacaaaaattagccgggtgtggtggtgggcgcctgtaatcccagtactcaggaggctgaggcgggcgaattgcttgaacccaggtggctgaggttgcagtgagccaagatcgcgccaccgcactccagcctgggtgacaacagcaaaactccgtctcaaaaaacaaacaaaaagatcaggtttgaggttggtttgagggtgctcatcttgcaatgagcaagtgcaggtgagctctgactggagcaggggcgtgtgagggctcggcgacacagagcggccagctacaccttcatctagaacggattcatgtcatctccaactccagggtggccagctgaagactgggccatcatctgttccgaatcattgatatgattgtgtttcctgtgacctgttctgttgttttagacctggtcagcacactcacaacttcaatgaaattaggaatacctttcacacagagctaggcacataagttgataagtacaacctgaaaaggcccaacttagccgtgagtggacataaataggagttgtattaccacaaaagtaaggaaaatatgccatgtacagatatcttgttcatttattatacaaaataaatggtggtctttgctcccaaagacccttccagaagaaaacagttgaatacttttagtgcagaaggacaactccgggttactggtagaacttaaaaactattatttacagtttctcttcttaactgtttataacttttgttcataaaaactggcagtttcctttgtctaaccactgcataccctctttctttaggactctggtttttctgttgctttttgtactgcttccatttgtgatagtcaaaaaagttgactccttggactcaaggaaatatggtcttggtttcttttatcctgggacagctagtcatagtagtggcaaaggattatctcattatcttcattactcattgtcatcccagagaaccttgatgaagagcttttagataaaacatgaatagagtgtcattcggccagttccgtagcaccagcagctcttgttgagtggtgttcggttagtgaacagttttatagtttctgaaaaggtgacacacgttcaatatcaaattaacaaataatgtgtacgtgagtgtgattgaatatcatgcagccattataaatcatgtcccaagaacatatttgaggatataagaaagttttgagtaaatgatacaagacactgtatgtttttttaaaaaaagacgacaaggatgcatctgagaatactgtgccattgtccacagttgactttcttttttcacttcatacttactgtttgtactattccacagtgtgcacagggatgaggtggtagatgggggtgttagctaactctgttgaagcagctaacctgcctgacagtactgtaagtgtttaaaaggtgtcagtatgcgtaatcatctcaccagcacccgccaccttagcctgctgtttctgctgtatcctctcagttagcttacgatagtacccatttgccctggccagaatccaggacttttacctcctaaataattcatatgagtgtttgtctcctccaccctgcccctcccctcctgtgctagttcaggccttgtttccttgtgccttgttcactaagccagctcagtatcctttttattcacgtaataccccccaaagaattagaaaactaggtacccctcacacatttttaagctatctaaaatgttttatcataaatttaaatggtttcaaaggatataattaatttttagcacatagtatgttgcatatgtgatttaattatatttccatcagcagtaggactgcagattcagctcattcagtttgggaaatgtgacccacttggcagccagtacccatcgtaaccagtcactcaaaccaggcacgtgtgatctcagaagaaatctcacttcgtcgtgtgatccagataagcatggcagtggggtcctggcagcagtcactccactctggatttagtccttagaattcattctctcccttcaaagccccccgggttcttgtcctcccccctgccgccaccctggggtctgccactctggggtccagcctctagctccagctccagctcagcctcacccccaccatccccctgaccccatcccccagctgtccccgctgtgcagtgccttgaacgtgctctgccgtgtgtcggcccgtttcctgaatcctcaggcatcagtgcctcacagagctgtgtgccagcagtgtcctcacagagctgtcaagcgtgtccatgccgtgccgcttgtgcctctgccccgcgagggacaccattccccgtcgttgacgtgcattcctcttgttcatcgtgcgagactccccacccctgtgccaccggtctcggtgtctcccacactggagtgtccgtatttcataaacacacgtatgtgtgcatgtatgtatttcttatggacatcacgtacgttggcccttcatatctacaggttccgcatccacagattccaccacccgcagttgggaaacacagtgaggtatgcacagcaacctttcagctgtggttggttgaatccacgcgtgtggaacctgcagatacggaggaccaaccaaggacttgagcagtcatggatttggtatcccaggagtcctggaaccggtccccggcagatagagggtctgctgcttgtgtttatgcatatgtgtgtatgtacagacagtccccaacctccgtggtttgacttaagatttttcaactttatgatggtgcaaaagcgctcccctttcggtgggaactgtgctgtgagcacccacgtgccattctgtttctcactcgcggtgaattcaagaaatgacgtgaaatgtccaacactttataaagcaggccttgtgttggctgattttcccaactgcaggctaatgtaagtgttgtgagcatgtttaaggtaggctaggctatgctgtgacattcagtaggttagatggtgcattcacttcttttcttttcttttcttttcttttgagacagagtttggctctgtggcccaggctggagtgcagtggtgcgatctccgctcactgcaacctctctcccaggtttaagtgattctcctgcctcagcctcccaagtagctgggattacaggtgctcaccaccacatctggctaagttttgtatttttggtggaactggaatttcaccatgttggccaggctgctctccaactcctgatcccaggtgatccacccagctcagcctcccacagtgctggggttacagaagtgagccatcgtgcctggcctgcattcacttcttttcttttttttttttttgaggcagagtctcgctctgttgcccaggctggagtacagtggtgcgatctcagctcactgcaagctccaccttgcaggttcacaccattctcctgcctcagcctcccaagtagctgggactgcaggcgcccaccaccacgcctggctaattttttgtatttttagtagaggcggggtttcaccgtgttagccaggatggtctcgatctcctgacctcatgatccgcccccctcagcctcccaaagtgctgggattacaggcgtgagccaccacgcctggcccacttactttcatctcaagatatttctaacttactgtgggtatggatggagcatctgtgtctgtcttgatgcactggtagccatttgttctgtatgactgtccctcatgccaaattcatctttgtactcctgttgcctgacttaggacatacctcctcttaggtgcttagtagatgcttcttaagtgagggagtgactgggtgcttctgttaatatcagtatgaacagagagctaagcctgccccaccagcccagcctgccttaagggctgtcttgtaacagcttcgcctcacaggcattcgcaccgtgacttccacaggtaggtttctttattccttccccgaaacatcaggggcattctgtgagctttcctgtgtgtccgcaggggcagttctgtccttggaagctgagagcagaagcactgcagggcccccaggccacttcctaggcacacccctaccccttcactgtgccctccccctaccccttcactgtgccctccccctgccccttcactgccctccccctgcctcttcactgtgccctccccctgccccttcactgtgccctcccctgccccttcactatgccctccccctgccccttcactgtgccctcccctgccccttcactgtgccctccccctgccccttcactgtgccctccccctgccccatcactgcgctccccctgccccttcactgtgccctccccctgccccttcactgtgccctccccctgccccatcactgccctccccctgccccttcactgtgccctccccctgccccttcactgtgccctccccctgccccttcactgccctccccctgccccttcactgtgccctccccctgccccttcactgtgccctccccctgccccttcactgtgccctccccctgccccttcactgtgccctgctgggcagccttcctgggctgcagggcagatgctctgtggtacctgctcccgctcctctcaggaaggccttcctctccctctctgggtcacctctccctggcacatgcttctcccaaacctgcatctccagtgtcttctctcctcagctacaacctgccatctgcaggtttaccaggcacttttcacgtgactgttccaccatcttgtcattttttatatcttctgtcattttgtaaaacccagctcatctgcctgctgcgtctccatgtccggcctgccctgggtgggtagagacaggttcgcgctgtccctcagatttccacgttagtgttttattggttagtttgtttctgggtctctctcaccctctagggagcagccacggctccccccaccgcccccgctgcctgctgctctcctcctgccgggccaggtgatgcagcgtctgaccacgtgcagtctttagactgccctagtcggtctgtacgctgcagctggattcgttttccaaacattttatttcaaaatacatttctctgtttagaagcacccagttgcccctcttgcctggaactgaaatctcaccattgtgacctgatgttggaaacttgccctggcttctgggacctggccctcttcgtcggccttgtgtccccccgagcctagcacagtgcctggttcacagcaggcagtcagtaaatggccactgagtgaatgaatgaggaaatgcagattccgccaacatttactcatcgaacttctttgttcttctttccacgagaattaaaaccttaagtttctcatttttaaaaatggtcattggccgggcgtgatggctcacgcctgtaatctcagcactttgggaggccgaggcaggcagatcaccggaggtcaggagctcgagaccagcctggccaacatggcgaaaccccatctctactaaaaatacaaactttagccgggcgtggtggcgggcgcctgtagtcccagctactcaggaggttgaggcaagagaatcacttgaacccaggaggcggagattgcagcgagtcgagatcgtgccaccgcactccagcctgggcaatagagactctgtctcaaaaaaaaaaaaaaaaaaaaacattgtcatagtggcaggcacagtggctaatgcctgtaatcccataatcccagcactctgggaggctgaggtgagtagatcacttcagcccagaagttcaagacaagcctgggcaacatgggaaaaccatatctctacaaatactcgcctgcttctgccactctgcaccatcaatataaataataactaattcacaataatcagtcatgaaagaataaaatggaaaacatgccaaatgcaggcccctgctttgttatcactgcatgccatacacataaagttctctgtcacgtgactacaggagcatctccattcctgtgcctcgtcctcaggtatcagacgcaagccactcgcgggctgaagtcagcccacagtcctccttgaagtcaacagaaatgaactactgagccacgaggggcctagacctgggatccgccagcgttttctgtaaaagaccatagaataaacattgtagacttcctggccatacagtatctgtccagctcctcagctctgctgtgaatgcccagctcttccatggtagcacagaaccttatcaccgtgcaggtgcacacgaggctgggctctgggttcctgtgagctctgcctaccaactcaggcagtagggggtggggggcgtccaaaggatgtgcacagattgccagcaccaggcccagctgctggaacatcctcatagctttactcacatctacacggacgccttaagttcaccccatcagtgcagggagacaggggccttcaaatgtgatgacacgacactgctgtggcctgtgctcttggaagcctgcaaaggccagcacacccgaccctcctctgcctcacctcctgtgccaccccatcctcacctgcttccccagcctctcctcatccacacctgctcggcccctcctccaccgcctccctccggcccgctggtccttactgcatcccctcgggccctgcaccctgccctctgctccctgtgccccccatgcctgctctcgccttgttttgcacacattctgtcctcttctagggtctccgccccctccccttccctgattaactcctgcctgtcctcactgtaggtcatgtcctgagggaagagggccccagcctttctagcaggaaaggccagagccttaggcctagggaaccaggaagggagcagttattagttgcccctggatacagaatctgcctagatgcatatatagaactggttcagacttggcacaatctctttccctctcactctttcacatttgcaattcaaagagaatatacagagccatttgtattatataaagtgattattgcattgaatttagactagagaaggcatttggagatcgttttagtaaattatcgtaaccaatctaaaaatacttctgaactgtcaaccagaacacagaaatcctgtattacttgctgtagtctggacagtttaggggaacgtggcaccgatctcatcttcaccgtcgatcagtggttctctgacttggtccagtggccgcacaccagctagtgaagaaaaccacagactccaactgcactgtgtacgctctggtgtcctcatttccaaaaaaaaaaaaaaaaaatctacaagatagagtttaagaaatctcatttgagttgccctgctaatatttgcagctcgctggtgggtgccgtggaggccagtactcaccgtcaggctgtggcaggtacagtgaaaggaaaaactccatgagagaacggtggaaagttcacctgagagtgaaacgcatgccagttagagtggctgaaaaatagcatggacaacaccaagtgccacgggacgtgcagccgtgggacccctcactgctagggaaggcaagatggcacggccacttaggaagacagcttggcggcctcctacaacactaaacatactcttaggtacaacccagcaatccagttactgcattacgctcctggatatttcacccagttatgccgaatgcttatatccacacaagaatctgcccaaagatgttgataccagctttatccatagttgccaaaaactagaggcaaccaaggggtccttcgataggtcagtgggtaaacacactggtaatgtggacagtaggatgttcagcatttaaaaaaaaaacaactatcaacccctcagaagacctggaggaaactgagatgcctgcagcccagggacggctggtggcttgcagcaggtcacacggctactcaggcgtagagcctggcctgtctgaagctcaaggcccagcacccgttcctttccttacacatagagtttcactaggcacgcacacgctgactctggattgatgaagaaacagtttgggaatttttaacagcatcgttcacatttttaatgcctgcctcctgcctggcactgtgctcagcactttcatgtatcttctttaattgtcacatctgtgaggtgggacagatgacctcagctctgtaaactcagccattgctgagcctgcagtgtgagtgtgaggccacatgtcagaaccccggaagacacaagccccactctcctgccttcaacacagccccccacaccgccgctgtggctggaattggagcaggtcgttagctcctgcctgaggaagcccaaataaaggactgcagaacaactgtagtgcaaagctgagactcattgccctcctaggcgtttcatgagcaggtcctgagttctctgtgtcccggcgtggagtgcaggaggcgtggaaagggagtagtgcgtgtgtgagttagtatacagaagaagtgtgtggcaggctctaccacacgtttttaaaatatgtaaactcctaaacttcttgtcagagaagcgcttggcatgcacacaaaatcatttagctaattcttgagaaacatattgtttaattgtctgtctcccttgctagatcataccactaatgagtgctcgttcactaacctccccgccagccttgcagtctctgtcaggcaggaggtacttaaagcatgtttattgactggctgcagaaatgaggacatctaccgtattcaaagatagtgcccgttacattgagaaaagacagagtgagcatccacttttagcttcttaaaaggtttaaacattctgatcttattttcccattcatttgcctaatggctgtcctttctgtattgcacaagggcaaagataaacacaagagtctgtacgaatcagccagtgtgtcagtaccagccagcctttccatgttgaagccgtaacgttaagtgatgtgaaagtatactgtgcattgccacacgggcctggaacatgttgtgttcacccagttcattgattttttcatattgataaattaaaattatgaacatataaagccagttattttagagtcatatgcaaatcttacagatacaaataaatatgtccaacacatagcataaaatttccttattgattttaaattgacagaaatcttaagataatcttgctaaaaaggaaaccagtcatatagattgagagatgtgcggagctttccaataaaaagcctcttcccgatgttctatcggttgttgaattgtaatgtttttatgatttgatcggcttgaactgtacctcacgcttggctctcttattgcctaattacacgtgcagcgttgacaaatggcatgcccctccgtgccgtcagcacactgacgttgtcaccattactaacggctggctggcgctgcttccagcaaggtgagcagctgtggccagtggctatgcgtttgggtcatggattccaccatgccttgcatgtgtgtttggtcacatgttctgccgtgtcttgcagagctgcagaaactggagggcagcagtggacctgtgcggacgtctcctcacagcccacggccagggctacggcaagagcgggctgctcaccagccacacgacagattcactgcaggtgagaacacctttcaggtgctggagtttaacctggcttatcacagtctggggacatggacaggaccatggcctttcatgccaataacaaaaagtatgttttcatatcctgcttctttctctcctaattatattgtatatactatactggggcactggaattctcacttcggcccgtcaggatgcctgtgcgccccagaagcacgctcacaagtgcccacactcagtctcatggtggaaccggcatggctttgggtcagcaggtgggttcgcctcacgactggcagtagcaactggcctgtgcggggctctggggcgtgtctgggcccggtaggaaacagtgacaggagcagttggttctgtccaccccaaggacggagggtccatgtgccatttgctcctcgtggtatatcacttgctctgaaatttaaaaaaaaagaaaaaagaaaagggaatgcacaaaatagacttgtgaacaaaaggaaactcatctgagaagaaggaacagctgcaaacgttgatacattcttacctttccctggggagttttttaactgttcttctagcttacatgggaatcccccgggactaaacagatcaccagatccttcagaactgtgatgagcttttgaaaggagcagctctggggagccctgacagcttagctatttccagcaggctccttctccttctttctcttcccccaagagccgacaagaagagccgctctagctttaaatgtactttcccccatcacctctccatccattggtttgccaaatcttaggctgttttcctatcatttctctccaacccaccaccacccacagttcgagctctcattgcagtgttgctttggcctcttttatgaacttagttcaagtttctttattcacattcattccataaactacctccaaaaaagcacacttttgatcatctcactttcctgctggaaaactgtgcccggcgcagtggcgcattgactgtagtcccagctactggggagactgaggcaggaagatcacttgggcctggggcttctgggccgtagtgcactttgttgatcaggtgttggcactagctcaacaccaatatggtgacctccctagagccaggaaccaccaggctgcctaaagagggtgaaccaccctcctttccaactaggtctgaaacggagctagtcaagagctggatagtttcccattggctaccatgtgaaatttcatcttctcgtgttgtatgcaaaccctcagaccatgacaggctatgtgtacactatggaatggttaaatcaagctaaatcgcatgcattgcctcgcatgcctttgtgtgtgtgtgtgtgtgtgtgtgtgtgtgtaatgagaacactgaaaatctgtcttagcaatttttagtatacattgtaactgtgtcaccacgtctacaatagatctcttgagcttattccttgcgtcactggattttgtttcctttgactaacatctctcaaacctcccctgcccggccctcctccccacccccagccccggcacccgccatctactctgcttctgtgagttcagtgttttcagattccatgtgtaagtgaggtcacacggtgtttgtctttctgtgcctggcttgtttgtctaacgtcatgtcccctaggctcatccacagcacaaacgacgggatttcctccatgaaagctgagtggtattccactgtgcgtcatgccacgttcctttatccgttcatccttcagcggacacttagtgaaattcattcttctcatcagtaaagtcagatccaattaggtcatttctaaggtacccttttaatcctaagtctctggctctgcagctgtctaatgcaaattcccaccattttcctgaatgtacccctgagagcacactgtgctctctcgtatgttgtgttttgtccactctgtacctttgtccttacgttccctgaaccagcagacccttccttagcctgtggccccttgaaattctgcagccctgagagctgccctcaaacacaacccatccctgcgcttcctctccttcctgctcccgttcccgccgtcattcccccgccctccactaggtggcgcattcctttggtgccttttcattttcatgacacctagcacagtgctttgcacacagacctgctcagtaagcactgtttacttattgagtaaacaattatgtaaaatcattcacattgttattaagctcaatagtaatttcttcttagagacagggtctcgctatgttgcccaggctggactcagactcctgggctcaagcaatcttcccacctcagcctcctgagtagctggaactgcaggcatgaggcatcatgcccagcttcaagagtaattttttaaatacgattgtgtaaatatgcaaagatagaaagttaggttagcccttattttaatatatgagaaattaacctctaacaccaactcataaggaatagcaaattctgaactggatatatgtagataacctattgtttccattgtattttgtttttagctctggtttgtcaggctggcactactagtgaagttgggccttttccagaatgctgagatggaatttgaacccttcggaaatcttgatcagccagatctttattacgagtactacccgcacgtgtaccctgggcgcaggggtaaggccatggtatttaatatttgtacatttgtctgtgtgtcgctctggtttgctttgatttatacataatttcgtagcctcagttttccttatttatccagtcttgaaaaatcagataagtacccagcaacaagccttgacttacagaatgctcccactccgatttaccgaaacactgacctggaggtgctccctggtgcatctgtttgtacatttagcagctacgtgtcaagcacctgctctgtcagggcagcatgatttggtgcaggggccgggtagtagacgtctgagctgcgctccacagggaagagccgtcccatatcgggacctggcgcacagagatgcagagcggtggaaccaaacgtgtccgtgcatatggcacacgccgtgacattttccgtttgtctctattctgatttaatttattttaaaaatctggttgtggttcaccctttgggtcacggtcacgaccattgtttggaaaacactaggctacagcatagggtagttctaggagagtgacaagaaaccaccagttgggaagggagaagggcgggttacggagagccttctgcagcactgggagccttgtgcagtgtgcgtctcttggtggagaacctcataaatatgtttgaagcctctcatgtgttcttaaatagaaaacagtcctggcaggatgtcttgtgagggcagtgtaagcagctattgaaagcccacgccctgttgtcaggcatccccagttacatcctgcttcccccattgaatcgcgtagccttggaggagttatctgacatctctgtgccccagtgtccttattggtaaaacagagatgccaatcctccttgctgcctgggttgtcctaaagatcaaatgatgtcacgtgtaagttgcttggaataatggctgctatctagtaccaactgtatttgctggttttcttactctcttccgaatgtatcagtaacatgggaaagtctcgcactgccgcattttgcaggctcgattgtcagcatttgttggctgcagcagtggagctacagagaatggtcctagttgtcaggaaatgcagagcctgattggaggtagaaaatatttaaaaccagtggtacaagagatgcaaaggcctgattaataataaaataataattcctatagaagtctcagaaaatttaaataaacattctgttgaacttggttgatactagtaggtaaatagatgaactaaaaaggctagaagtaaaaacaaatctttgaacttctttgtgtgttgtttttttggttaaaactcagctctgtttctttggaggggcataggaacgaatgtagacgccggctttctttattccccatgctctctcctttatcatctttaccttcctccaagtaggacgggtgggaattggtccatattactctgagttatcccagaattgatggagatttttatcatttttagtataaagtgttttttgacctttagtctcactggtattaaaattgtttcttccttctgactaagggaatttgccccttgtggaaaagaaaaaatgggaagggtaacttttaataactaaaatagggcataaatcaaagagattgtcttgatggagctggcttgatttcatggaagtgaaccaaccaagctaggtagccacagagtcaagaaggaccagcaacaccactatcactctcggacgtaggactctgtgtcatccagggacgtagacgccagtccttaatgtgtgacacttcctgcccacccactggcctgtccagtcctgctggccttccacatgaccaggaggaacagaccaaagccaggaccgcttgagggtgcgtgttcaggagctctgtctgccgtggcctggccaacaggtggaggaagtggggccagaggagtctcgggaacttgctgaagggccctcactggtgttgctggccaagcaggccttctgtccccaggagtctggcttttgcagccatgggttggataaagatgtctttacctcttccctggggtatttcttctcctgcactccagcctggaagctgctcggtggtcgtgagcactgtcctcgaggagcagggctttatccatcctctctcccccggagcaagtctcgtctacgtccctcccaaagttccgtccagtccgcacgtaggtggttcccacatccgctcatgagttggagagatacagccatggctggttgttcaagggctactgttctaccttgtaaattaactgggctccctgattctgtcgtgtccctttcttgtctccacttcatcgccaatttgagggtcatcctttccgtgtaagaccgaatttccagcccaaaaagaatggggagcctgtcacttggtaggttgtgaagaaaagatggaaaggttaaaggcattgttaattggggaagtttgagggtgtttctgtttaatcagttatgcctggtagctatcatagtcaagaaacagctgttttcctatttcttacacggatcagccttgttttcccccatcccagcataaataaaaccatctcttccctctgcctgactgcagcctgagcatcgcctccaaccccgccctcccacgtggttcatagtcccgggagggggctggacccaggtctgtgggactctgcctgggccggggactggaactgggactgaacagctggttttttaggcattttgtctgctgctaacagaaaactcaggtcattgagcacccaggccttaatcgaaaccaccagataccctgaagcgcagagctgcaccaagtgctctggtttcttttcctactgaggtccgtgtgaattatagattcaaaatgactcctcttacaacacctgcttctgaatttatgacaggtgtttaagaatgagtgtgactgaaaggcagatgtttcctatcatgaccaggtaaaaatatccagcttggctgggtacagtggctaatgcctgtaatcccagcactttgggaggccgtgaagatctcaagatctcttgaggccagaagttcgagaccagcctggccaacatggcaaaacccccatctctactaaaaatacaaaaaattagccggacatggtggtgcacaccagtactaccagctactcaggaggctgaggcacgagaatctcttcaacccaggaggcggaggttgtagtgagccaagatcataccactgcactccagcctgagcaacagagtgagactctgtcccacaaaaaaaaaaaaactccagctcccattggtctctaacctttacctttggccattcaggaatgcccaacatcgccttgtgtatcctattttacagtgtgctgaagactccgtggcactgtttacccatctctaaggagaggattttgatggaaatgacactgagtgccctttaagatagcgaatgaaaatctgtgggtttaggtggaaactgcctgtcatctttcctcactttgaggacattttttcctaaggacgttcagtcaagcctagaaaacatgctttgattcttcctgaaattaaattgcattggtaaatggataaagagaagacagcagctacgcatcattgagaagctaatttaaattatgaaatagacataaatcatacatacattttagcaaaagcgtattaacattcatcctcaataatatgctggatgtttactaatttttcttcccattttgtggtgtaacaaagcataaatgtaagattttgattcattcacttcattttcgcttgcaatatataagcagagcaagttgttaaaatgtgctttaaaaggaggctataattataaaaacttttatgaatgagctttaatatatttcatgtaaatattgggcgtaatttttgcccattcagaatattcataacaagacatgtaatgaatcatgtgtaaaaatcatgaaggttttttaaaaaaaattcatccaagaaaggaacagtattatggttgatgtatttacatgtcaaatctagcaatttcagtcagttcctttcagccacccccaaagcccagccccgtttctgaccctggcgctgtgtctttcacttggttgtttggagactccctcctgcacacaggaagaatcccgaggactacgtgcctggggccgacccagccccgcgcccccggagctgaggtctgtgcggttctgggtggggcccccaaagccacaagaagcccaggtagcactgactctgacctgggtgtcctctcttgattttcctttcttgctcctcaatctccacccccttttcctctgttcctcttctactgcattcgttgcttcttcccctctcagaccctacatccatccctagaacccagggcccagcttcatccatccccagcacccaggctgcaagcgggagaggtggaagctgcttgcatcaagccttttatcagagttcctttcgtgggttgtggggtagtcattgaaagctcacatttgtgtttagaagccaactggctgggggttgtgagcagattgtccacatcttttcattcactggaagtcctctgtgtccctgcaggacacacttaaagactgtgtggctttagctccctcagacttcacacataacttggcaactgagctgttctgtctagaattgtcatgcagcttcaggaattcagaggatcggcgttggtcatactggtggaagatgtcaaaacaagaagaataaaaatagtgtgcagaaaacttgctcttagccactgtcttatctctgaaaattgaacttcacttgcatagtgataccctgtatcatgcatctccagggacagaaaaaaagataagtatatcttaaatttgcctttcctattcgcgtttctctgattttgaaacagaagttccctatccgtgaattcttcagatagttgaggtagagtactcttgcattgcacaggatgtcactgttgtttccagatggatttgtgcaaattcagatatttgatttttctatgttgcccacgtctatttactgtttacttttactttacttttttttctgttctaatagctttttaataaaagctatttacttttgttctaacccactacttccgtaccttatgagaaagtctgttttgggatctggttgaatctattctttgctcaacaaaaattgatgtttatttaaatacaaatattaaatactcggaccattaacaaatattttttcatatttgccttagacatttttgtaacaaatgaaagtacccattgctgatacagcctgtgaacctcctcccaattcagtcccctcccagaggcagtcacaatcatggtttgttgtgtattcttccaggtcatgtttttacatatttgcttcatacacacacatatacatacacacagagaaatacatatacagagagagactattgtcttataagctttgtaaatgtacatcatgagcatatctgtcttcatttgcttttttttccccactttccattattcatatccatccatatccgtatccataaggatgaacaattaggatctttccacctttcggctattatgagcaatggtgttatgggcatccttgtacatttccctttgtacatgttcaggcgtttctctgagctgtaaatttaaagtggcatatgtgagagtgaccatgctaatttccactcccagccacagcctgtcagtttgtttccccactcttgtgtaactaaagattgtcagactttcaccagtgagtctaaaattctacctcctgtcgcaactgacgtctttctgatttctgccgaattatgtgtcctttgtctgtcggagtctcctctttggtgactcactctttcataatcttggcctgtatttctattgggttatctttgttattaattggttgaggttcattctatatagcaggtatttaatccttcatctgttttgtatttgggaaatattaatatcttctcccattctgggaaatactattttcaaccctgaaaaaataattctagtttaaaaatacaaacataaccttttttgttcgcaacatgacatgttttaggagtatcttctttattccacatactgttatatcaggaataataaatgcaaagaaatcatgcctatgtcattgccaagtaggctgagacaagtaaagacatttaccagacagctttccaaaacgtttcctaagggagctgctgcacactgttgctgggaccttccgctgggtgtgggaggagctctgcacactgttgctgggaccgtccactgggtgtggaggagctctgcacactgttgttgggaccatccactgggtgtgaaggagctctgcacgctgttgctgggaccgtccgctgggtgtggaggagctctgggagatgcggtgttgggaagagagtctacacagttgctgacttgcagctcttcacctggagcttccaagagctctgaggcaggcccgcagagcccctcgtgcacacttgtcaaagatgctctctctcctggcatacccttgaggccctaggccacctgctgccctcgccgtcttccatcgagtacagtgggatgcacttaacgtgagtgctcccgggatctcatcccacagagtctttggccctgtagacagacagtctctgtaatcttgtaatctccccacagcacagccgtctgccttcactggcacctcagcatctgcagggagcatcccggtcccaggaaacatcatccagcccagagggcggcagggtcgccgtcgccatggatgccagcctttacccagcactaaaagtatttttgtttttgtttgtcttaaatgttgataacttcataataactatttacgttagggctttaaaatacctttccaaaatcctacaaagtttctcttttgagagccattcttcagatccctgtactagccttctttctttaattttcttttagatttttttttttattttttaaattgttacactagtgcagattgtttctcccattatagggtttgcagtcatgaaaagtgttgatagggattatatccatgaaaatatttctagaacattcattcattttatattaacagcttgcattggtgtggtacatttgttacaattgatgaaccagtattggtacagcattattaacaaatgtttatagtttacacttgggttcactcttgtgttgtacatattcactatgttaaagaaaattaaatgtccattcctgacaagtttaatttcatcctctctcaggcagttaaatttttccagacccccaccaccatctttttaatctgttgtttggaattacccctctcgttccaaagaaacattcacaatggcagtgagcatgtaaactttcatagtgctttgaatttttaaagtaccacattctgcattagattgctcacttcaagtttccatgcaactagagggaaaataggagcccaaaagatcttcccgctggaaataaagcagcttgattatcttcactatgcagtttaagaagtatagtgctgcttctaatactaaattcagatctgcatgtttagactaagttacaagagctgtaatgacgtcacaggaaatggtacttcagaacttaatccgtgcggattaccatcaggtcaaattaaagtggatggggcaaacacttccattaatcggatgccgaatctctctactcttccatcagctgtctgctcctctatgtgcataaaggcacactgtcactggatctttcttcctttttcatcctccctccaaaatcatgaaattcacattttgagttctcaaattaaattctgaaacttttttttatcaacacataaccatatgtgatatctcagaattaaatattcagcatgtttccagtgtcggattttatttttcatgacaaaattacctcaccttgcagagtgaccacgttctgctttagatttccaggtcacaatgctttgcatcagaactcccgagcgttgatggttggacatgtgatcgctgctttatttgttcggagaaggctcgttagttcatcttactgcttttcactttgcccaccgtttttatgaaatctggcattttcagtcttttcttagaacaaactactaaaaataggggaattttcagtttggggttccgtatctaccatgagaacacccaaatggagacctctccttatcctgtctgcacaagatacaggccttggccagtcactgggctgtagctgaagccacacgtggattgcacatgactgtggcagacgcgtacagaggcagtgacccaagcctcagtttgtcttcatgcttcagggctttagttaagcaaatcatttaaataagaaatatttaaggtatttttttctcttaggactttctcactgtttttgtgtttggtttgttttgttttgtttttaatttacaatgccacattaaagtcaaaaatgacttgttgagagctgtaagtgtgacactgtgtgcttggccgggcacagacaccaagcagtatccccagcgttgagcacaggcaaaccaaaggcatggcttatcctgcctgctgaggtcaggatagggaaggacacacccagacaggcagagacagtgggaaataaatacaaagcagtcttcccagcaaagcactcgcgtaacttgaaaatgagacggaaatgccagggcaaacttgtaagtttgtgccttactgaagaaagctgttaaaattgggcaaagggtctggaaggctcccgcagacccttctgtgaggcaggtggcacaggcgtccaggcatcatgtcacacctgctgcggcctcacggcaacctagctgcctctgggccctcccgccctagtttgcagtgacacagaaggctgcagagaggatgtgagccacccagcacaaacagctagtgagtggcggaaggtagcataccccactgaagggaagctgaaatgtcatctttgttccctttcatttttcactgcccagcaccaaggcccgggcaattcctggcacatttctcttttctatagtggcagcacggattttcagcacaacaagggacggtctgaaataaattttgtaggagtattttcatttaatgttttctaaatgatgaatgagaacacttctacagtatttataccaacctagattttggcaggtcacaactatacatgggaatcttccggaaaaatagatccactaggaattgtttttccttacagattttgactagcttctcctttttttttcctttccaatgctctttctccctgcaggagagagacgggcctcagggctggtgtggaagccttgcatattttatctcgcttgacaaccaccctcagcatggaggatttcagtgagattcccagggtagctcttcagagacaggggctaggtttggccactgagagaatcagcttaaaggtatttttatgtgcatttacttaagaacaaaagtatgaattacaccaaagcagcttctgtatgcatcttgttgaagaggggagtagtttccttgaggacacggacctcgtggctgtcattgtgtgcacccagtgcaggccctcctgcgcagcgctaggagctgctgagtaaatgtcagctcagtgaaattcacacaccttacctggagctcacagatggtttctccagctgcttccatttattgttttaattctgtgatctatatattttttctaggaaggggtgtttttctttctgatttaattccctacatttttctctttcatatgaagttgcagataatgtttttccttcggatttttattctttaagatttttaacctgtgcaagactttttcaatgatacaagtcaaggaggatgaagatctttttccacttcagtcttcactttgctccagctattgctaagaaaggcacaaacaatgacagcatatttaaggaagaacctggccggcttgggtcaccgctgctgtctttcttggttttgcgtctacctgggagagcccagcttttaggttcccattgagggaagcatgagagaggattgtttgggggatgctgccagagcttccagctgacagtctctgcagagcggctgccaagtggcctggtggccgtatgttggcagtttttgatgaattgggattagggaatgtttgtttacttgataaccgagtgtctacaaggagaggtggcagcgtgagggaatagtgccaccataatgaggacacagccagccatctcttccctgccacagaaccccaggcagtccccttcaggctacagttttccatctggaccgagggactggccggtgcagcaggaggagccgatcaccctctgtggcaacgaggatgcccagaagttccagttactgtggtttgtatgttcttctttttgagatggagtctcgctccgtcgcccaggctagagtgcagtggtgcgatctcggctcactgcaatgtccacctcccacattcaagcagttctcctgcctcagcctcccgagtagctgagattataggcgcatgccaccacgcccagctaatatttgtatttttagtagagacggggttttcgccatgttggccaggctggtctctaacttccagcctcaagtgatctgcccgcctcagcctcccaaagtgctgggattacaggcgtgagccaccgcgcccagctgagttactgttaactgttactgggggggcaggggaatggctcattaacatttttttaaataacattaacatttttaaaatgttaaaatttaattctgaaagaattttgctacattagcgctagttttaattgtgattttattcaatatgtcccccaaatgtaaggaagaaattggtacattttgttcacaaaaatatcctccccacctcccaaaagcagtagaaatgggagtgccatagcacgggggagatttgaaaagagcccggaagttgggtttgttggaggaggaggatctgagcacagctcagctccacctgctccagcagcgcagagtccacgagtacaagcaggtgtttggtccccaaggcctcacagaagttcaggcagaatttcatcactttcttttcccttaacccccatttaggttttaaacgcctgtgtggtttttaaaagggtagaagtagcaaggaaacaatatatatctaatgagggacattttcctgtgtgatatgtaatgaatgcactatatgtagtactaattacctgttataatgaaggcactgtatagtaccgattacctgttttaatttgatcctaaggaaggtcaatgtgcattttgaggcattataaaaatatagttgatattacctgataacctttgagttagcgaattttaatttcacatcagtaaggtactgttttagagcagtgcttctccatctcagcatgcacaggagtcacccagcctcttgtggagggcaggccctgatgcagcaggtctgggcagggcctgagactctgaagttctaacaagggcacaggtgataagactgcagctggtcagaatgtacctttaatcaagtattaatattactctttcagctacagctggccactatatttaatagtatttctgagaaaaaaaatacatattttaagtctcaatttgagatcccaagaacacagtccttcaccccaaagaaatggatctgattttatcttttttcatgtggcaatccccatatctgaaccatgctcattaaaaactccattttccatctaataccttggagacaccatctttattgtatactaaagaatatatgtattccctttttgtaatttacagaaaaatcgagtagagagttctatataccctcttttcttctgcacagtttttaataacatcttgcatttttattattaataagtataaaaattttgcattagcgtagaacttttattataattgataaaccaatagcggtacattgttgttaaagtacatagtttaccttagggctcactcttggtgttgtcccttctgtgggtttcaacaaattaatggcgttgcgtgttcattgtactgtcatgccgaatagtttcactgccctgtgtattaatccccccaccacccctggattaatacccccatcacccctggattaatctccccactacccctggattaataccccatcacccctgaattaatccccccatcaccccaggattaataccccatcaccccaggattaataccccatcacccctggattaatctccccaccacccctggattaatctccccaccacccctggattaatccccccaccacccctggattaatcccccaatcacccctggattaatcccccaatcacccctggattaatccccccatcagccctggattaataccccatcaccccaggattaataccccatcacccctgaattaatccccccaccacccctggattaatcccccaatcacccctggattaatccccccatcagccctggattaataccccatcaccccaggattaataccccatcacccctgaattaatccccccaccacccctggattaatcccccaatcacccctggattaatccccccatcacccctggattaatgccccatcacccctggattaatcccccaatcacccctggattaatccccccatcacccctggattaataccccatcacccctgaattaatccccccaccacccctggattaatcccccaatcacccctggattaatccccccatcacccctggattaataccccatcacccctgaattaatccccccaccacccctggattaatcccccaatcacccctggattaatccccccatcacccctggattaataccccatcacccctggattaataccccatcacccctggattaatccccccaccacccctggattaatcccccaatcacccctggattaatccccccatcaccccaggattaataccccatcaccccaggattaatcccccaatcacccctggattaatccccccatcacccctggattaataccccatcacccctggattaatccccccatcacccctggattaatcccccaatcacccctggattaatccccccatcacccctggattaataccccatcacccctggattaatcccccaatcacccctggattaatccccccatcacccctggattaataccccatcacccctggattaatccccccatcacccctggattaatcccccatcacccctggattaataccccatcacccctggattaatccccccaccacccctggattaatcccccaatcacccctggattaatccccccatcaccccaggattaataccccatcaccccaggattaataccccatcacccctggattaatccccccatcacccctggattaatcccccaatcacccctggattaatccccccatcaccccaggattaataccccatcaccccaggattaataccccatcacccctggattaatccccccaccacccctggattaatcccccaatcacccctggattaatccccaccacccctggattcatcccccaccacccctggattcatccccccatcagccctggattagtacttccacccctggataaatccccccaccatccctggattaacccccatcacccctggattagcccccatcacccctgggttagcccccatcacccctggattaatacttccacccctggattgatcccccatcacccctggattaatcccccatcacgcctggattaatacacccactacctctggattaacccccatcacccctggattaatacccccaccagccctggattaatcccccgccacccctggatcaatccccccaatccccctgggttaatccccaccacccgtggattgatcccccctcacccctggattaatccccccatccccctgggttaatcccccatcacccctgggagcttggagtctttccattgtctccatagtttccccttttccaaaggtcttatagttggaatcatacagtatgtggtcctcagattggcttcgttcacttaggaatgtgcatttagggttccgctgtctttttctgcttgatagtacgtttcttatctctgaataatattccattttatgtatataccatagcttatttatccatttctctgttgaagaacatcttggttgcttctggtttttgacaattatgaataaagctactataaacattctttttcagggttttgtgtagatacaagttttatcacctttatcagttccaatccttgggtaaatctctaggactgtgattgctggatcttatggtaaaagtattcttagccttgtaaatatctgccaagcatcttccaaaactttcatactattttgctttcctaagagcaatcaatgagagttcctattgattcacatcctcagccagcttttggtattgtcattttttggatttttcgctattctgataggtgtgtagtgttacctcattgttttaatttgcagttccctaatgacatatgatgatgagcatctttttatatgcttgttattgataaatctttattggtgatatgtctgttcagatctgttgcccatttattaattgggttgttttctcattgtctgttttttggagacagagtctcactttgtcacccaggctggagtccagtggtgcagttatggcccactgcagcctcaagcccctgggcttaagcagccttcccacctcaaccaatggagtagctaggactgtaggcacacctggctagtttttgtattttttgtagaaacaaaaaaaagcgatcagctcgcctcagcctccccgcgtgctgggatcccaggcatcagccaccatacctggcctgttgttgatttttaagaattcttcatatatgttgaatacaagttctttatcagataggtgttttacagctattttcttcctatctgtgacttgtctcttcattactttaatactacgttggacagagcatacgtgtttaattttaatgaagtccaacttactgatttttttctttcatggatggtgtttttggtgttgtatctaaaagattatcagcaaacccaggtcactcagattttcatctgtgttctgttctagaagttgtatagtttttgcactttacatgtagtctgttattggagttcattttggggtaagatgtaagatctgtgtctagattcattttttttttttcatgtggacgtccagttgtcccagcaccatttttggaaaaacctgtcctttctccattgaattacctttattcctttgtcagagatcaaactgactatatttgtgaggaccaatttcttgtctttctgctctgggccactgatctatttgtccgttctttttctaggaccacacagtcacccagtcttttttacagtagctttagagtagctctgtaaggtgggtagtgtcagcctgccagatttgctctctttgatattgtgttggatgttctgggtgttttccttctccatattaacttcagaatcattttgttgataaccacaaaataatttgctgagattttgattggggctgcatcgaatctgtaggtcaagttgtaaagaactgatattttagcagtattgtcttcctgtccatgaatgtggaatatctcttgatttcttcagctctgtgaattttttcatcagagttttatagttttcttcctatagctcttgtgcatattttgtccattttatacgtgggtatttcacttatttatgtagaaatgatagtgtgtttttaatttcaaattcccatcatttattgctagtatctaggaagccagttgacttttgcatattgatcttgtatcctgtgacttttaatcacttcctagtttagaagtgtttttgttctttgagattgttctttataattatgtcattgcaaacaagtagttttatttccttcttcccagtctgtgtacctttggttttcttgtcattgcattagctcgaacttccagtacaatgttcagtagaagagataagagggaacattgttgctttattcatgatcttagggggaagtcactgagtttctcactcttaagtttgttgttagctgcagttgttttgtagatgtcctttattaagttgaggaagtttccctctattcctagttggctgagagtttttatcacgagctggtgctggattttgttaaatgcttttctacatctattgatatgatttttgttctttagcctgtttgatgtggtagattatgttaattgattttggaatgttagatcacccctgcatacctggaataaattctgtctggtcatggttcataattctttttatacattgttggatttggttgctaattttttgttgacttcagttttcttagatttagtttgctaattttgttgaagatttttgcatttatgttcatgagacatattggtctacagtttttttttcttgtaacgtctttgtctggttttggtattagggtaatgccagactcatataagaagttagaaagcgttcctctgcttctgttttctgaaagagattgtagagaactggtagcatttcttccataaatgttaggtggaattcacagtgagaccatctgggtctggggcttgctttttggaaaggtttttctttttctatccaagttaccaaatgtatggacatagagctgttcataatattcctttactattcttttactgttcataggatccatagtaatagtccttcacttctagtactagttgtttatgtcttctctgttttttgactagcctggggagagacttattggtcttgtcagagttttattggtcttgtcaaagaatatgtttttggtttggttgattttgtctattgatttcctgttttcagtttcactgatttctgctctaatttttattattatatttttattattttcttattataatacaataatatttttattattttcttataataaaatattttattttcttataataaaataatatttttattattttcttctctactgcttactttaggcttatattgctctttctttccttctagttttcaaaggtgaagctggtttcagatctttcttttccaatatatgcatttaatgctaaaaagcttcctctcagcactgcttttgctgcatcccacaaattttgataagttgtatttttattttcacttagttcaaaatattttcacatgtgcttttacatccagaagcacccccatgtccatgggcagttgtcaggataaggggcagctaactttctgccaccttctcaggtgaagtggcaggagtcacacagcctgttttctcaccatccaccaaactgtattccagatcggagtattaacagctagtctataaattgagatcggagtattaacagctagtctgtacgttgagatcggagtattaacagctagtctgtacgttgagatcggagtattaacagctagtctgtaaactgagatcggagtattaacagctagtcccaagttgggtttgagaacttccagtagaggtttgtttctgtgcttatcttatagagcttgaagggttcttgagatattctctcccttgtggtaagtgataaaccacacaggagtgattctggccccttctctacttgagacagaaggatggaagtgacgtggcttacatataacttaccatgttgggccggttccacagtgacatgacttacatatgacttaattgtaggccagtcccctgtgtcattatgcggatggtctagaaatgtttatttctagaaaaccgaagtgactcaggctgtaacttaagctcggccagatattctcttgagatacagaaattatttagtggcatcaaaaaagaaagtttaaacattttaagttcaataattgttacctttcttttctccaggcttataatcacaatagaactgttttccatagtgttccttaattttgactgtcttctttttggacctttgttattaaagaccataaacataaagctcatttcagtgtggtcacggcccattctcagtaatggttaatgaatagacagatggatgcattgaggcacagatacattaagtggcttgcagaagtcatacgcgtgttttctcaccatctttcagactatattccagatccgaatattcatcgcttaggcctattttgaaaagcactttactgaatctatgtgattgccctctggcatttctctattctttatctcatttataatcagtgcacgctatttgattttttgatgattgttatctacttagtatacatactacagatcaaattccaaatcctattagaagagaacacaatattaacaaaaagttgaccttaccctgagagatgatgcagccacaggtgatacgatataaagggggtttctcctgagcttcttcctcttcttagcgcacgcaaagccaggcagctctgggtgatggatttttcaagtccagctcccttgcctcctgtcagaggtggaacgcaggctccagggccacatggaatccagtgggaggcccatccccagggccgaggcctgagacgcacctgtgctcagtttcgcctcctccccactggttttcccgggagcacttccggaaccactggctggcttacggcttctcccttcagggtctccttctggggaacccaagctaagcaacctaccattcgagcttgctaaactaaagaaatattaaagaatatctgagcattctggtttttcttttattggaggaggggttggcggtctctactgtttcattcattttgggatcatttctaaatgattgcagtgtagctttggaaattgtggtgtcatccacctgtctcctctgataattgtcgagacatacatacatagagctccatagagaaaaccagcatgtattttatagttgacaccgttaaatacttcacaagaaataaagggatctgtcatcacttctgctgggacatctgcgacgcctccttcaagtgtgccaagtatgaatgcgtgctcagttatggcaaacaaactcactcagcactgattggattccaggctccatggtccccttctcgatgcgcatcttgcacgcggagcttcagcagtacctggggaacccacaggagtcgctggatagactgcacaaggtgaagactgtctgcagcaaggtaggtggcgctgtcattcttccctgccacggggagaacatgccctccacgccctccccacaggacatgcccgtgctgttccctgcccgtcctgccccatgcaccatcgctgcttctgccttcagaaggctaggtgacccggtttgtgtggcctggtagtcgtgtctcttgctgaaatcttttttagggatggtaagagtttctagcagagcttgagtcctgtaattcttactgcctggtactatgggaagctgaaaggcagagacatctttcttgccaaggctgccagctgaagcttcaaggtcagtgtgccagaccacccctgtgtcccacaagtgcccacacgcacctgccacgtgcagacagaggtaccggagcagtactgaaagcaatcatggtttaagctttcaaatccaagtaagtgcttctgcattatggcaactgtcactcatgatcctgactgcaaaggcagagtcggagtgttttcggactcattcttggttgtgaagtcacagttaatgtgggagccaccaaagtggcacgttattacactaactgacattgggaagaaatgtgggactcagagactttgctgtctacaggttgttatagagtattcatctcagattaggaatgatcctgcctttctacccacgtcacagtgttcctgtataggttcagtgacataaggtatgcggaagtactttgaaaactacaacaacaagcagttattaggagcagcagcatattataatttttgggaaaactaagattcttcttgtcagattcctcctttcacttcctaactgttgtggtagaagttttgcggagttccaagatgatggtgttaacagtgttcctagtaaggaaggaaggggccctctttatccttatctgtggagaaaaaacaggcgtttctaggccccttgttgtcctgggctttgtacccacttccatttttttattaccataacttaaaagataaaaagaaaaattgtttgctttctgtactatatcagttgatggagaatcatgttaccaacttttttacatttcaacacttttcttgaatcttaaaacggggtttaattttatttacagaaatcggaagcacataacttgaaattgagaagttctaaatcagtgactttctaaactatacgaatttttcattatcctccatgtcacattgtaggaaatctttatagtatttgagagagaaaattctgggccatagggtgatttgtggatggaaaagccaagttagttgaagtagttttgcaagtcagctttcctggtcctgttatgtcctatttcagaattatgctccttaaatgcatactacaggctgggtacaggggctcatgcctgtaatcccagctacttgggaggctgaggcatgagaatcgcttgaacccaggaggctgaggttgcagtaagccgagatcaagccactgcactccagtctgggcaacagagcaagactctgtctcaaaaaaaaagaaaaactgcatactacagtgtaacgatgagaggagccacttagcactagctatgaagcagcagggacggtggagcagagagcaggagcttcccacaccgctgctctgggcacctgcacttactccacctgacagacacctttgttgcattcattatgaggcagccactgctctgagttccaatattaactcatttaatccttatcacaaccctatgaaggagatgttattatcccaatttacagatggggaaactgaggcacagataggttaggtaacttaggatcacatgagttgaacccaagtcatctggctctaaagtccatgctcttcatcacttgcctggcttcatcactataacatgtcccgtttgaagacagaaggaccgagagtcctctcttccaccctgcaccagcatttctgctccaagaaaggacagtgctgtccggggtcaactgacatctgctcagaagacccctgtgctgaatggggccctgccccttccccctgactgatgcctggagatgggctcgagcctgtgctctgctgggctgggccctcctgagactcttgagggggcttccaagcaacagcagttgacagctaagcatcgtagggttggggagaaacgagaagggttagtgcagtcacatcctaggaacgtttctctcaggctgactgggcgtggggccaccgtcagtgagagagccactcatgcttctcgttccctccgctggtctacagttccacctgcctctcatcttgtgaatacataaccgcacttcaggtatctctcatgtttaaagatacatatcttttccatggcatgatccaaatctaagccaacactccttatggtacttaaatgaggaaatcgcaattcgttctaatcctggaagaaaaacaagcagttggatttatgaaaaggtgtgtgttggtcttcaccttaaaggattttcaccgttaatttcaatatgtaattactatgtgttcctttatgtgctgacttaaaatttgacaccctcttgagagagagagctgcactgtggcacagctggtggatgcctggaccaagagggaaagacccagggcatgaccatatagtcagccttgcctgtccgccacctttggcaggagaagaagcaccgtcgccaacttcctcgctcacttccttgcacgttaggggctcatggccgcatgtgggcattcttgacctttctgcggctggttcagtgttgaactgaagcagtttttatctggatgtgaacagtgggcactgcggggacatggagcaatgcgtctccacgctgtccagaacagctctatctgagcttgttcatttgttcatgcagcaaatgccctttcagcacctactgagtactgcacactggcagttcgggactcaacagaacgcagcctcgccctcagtgagtttacagtttggtagacgatgcttgtttcacctgttccttttaggtttgcagccatcaccaatacatcatgatcctccagaatttaaaaagggacagtttgtgttcatgctagaatttctttactcaagaagtgtgtattagtccatctggctttgccataaaggaatacccgagggtgagtcatttataaagaaaaggtttattttggctcacagtcctgcaggctgtacaagaagcacagtgtcagcatctgcttccagtgaggcctcaggaagctttttttttttttcttgaagcggagtctcgttctgtcacccaggctggagtgcagtggcgctattggctcactgcaacctccacctcccaggttcaagcgattctcctgccttgcctcctgagtagctaggattacaggcgcccatcaccacacctggctaatttttctatttttagtagagacagggcttcaccatggtggccaggctagcctcaaactcctgacctcaaatgatccacccgccttggcctcccacagtactgggattacaggcatgagccactgcgcctggccaggaagcttttaatcatagtagaaagcaaaggggaagcaagtgtgtcacatggtgagaaagacagcgagagagaagaggaggaggagggaggcaccagactttttttgacaatcagatcccaaggtaactaacagagccagaactcattcattgccatagggacggtaccaagccacccatgagggatccacccccaggacacaaacaccccccaccaggccccacctccaacactggagctcacatttcaacatgagatttggaggggatgaatgtccaaactatatcatagtgcaaaatctaaaaatactaaaagccagcccaccactattctgccggtgttgatttgctggattaaagtgaacggcttggtgtggcctttgatcccctctgctctccactggtgagtaaagagagaggtcagaccagagactccagggttctccagcatgacattctgattttcccagaccttcacaactccaggaaatcctcaggaagtcttaaactaaggatgtgttagtgagacctctcggtccgtggactgccctttgctgcattgtttaaagtattcaccacacctgccccaaaccacacgcacacacacagctctgctcaggacacgtgctgtgtgtcccagcactgaggtgcagtcacgtgttaacgctgcatggatgtgtgaggtgctgaatgcattatgttgattaccccctactaatgcccacagcagctgcaagtgattttattatcctcggttcccagatgaggaaagtggcctcagggaggtgaagtgttccccagacaactgcagtgaggcagcgatggagcctggctgagccccatcacacagctccagaagcctcacccttgagcaccactctgcggttctctgtgaaattagaccatcaggattgtggttttttcctccaaatacagacttttctctgatgctttgtaaagcaggggctctaaagtttggtcttaagcgtcacttgaacagttccagaaattttagcaatctctactgcacttgctcctgccaaaaattgctctcagtagattcagggaactgtggactcttccagtgggtgaggagagtcaaacagagtgaaaagaaatgagtccagaatgttaaacatgatttcctttggtgccgttttccattagctcctcctcccgcagggcgtggagagcagccggttactcgagggtagggcgtctagagcagccggttacgcgagggtagggcgtggagagcagccggttacgcgagggtagggcgtggagagcagccggttacgcgagggtagggcgtggagagcagccggttacgcgagggtagggcgtggagagcagccggttacgcggttacacgagggcggagggcgtgtgccgggagcacaatccgggccgaggctcctggtaagggagcagagcgggaagctgatcccccacggattcttagggggccgacttcccctgtgttgaagattcatcaaagactgattcgagtctgtgttcagcatgtgtgttttagattagaacagtgttgagaatttttatatggggcccagttttagcaggacatcatttaggatctttacaaacgagttcagggtacttcgttttatctgttgtctttgagccactgagtgaattagtaaatgtttgcaaatgtgattgcatcagtgaagaagaacatataccacgagttaaaataaatttcccgtgctgctgaaaaatcagtgccgccatcctctgaccctgctcctcccacgcgccctgcaggctgtctccctctggggtcgagagagcttcacagaccatttgggaaagagccaagcaaacacacttctgcaagccatttgcataagtagacataatccatacggaatgatgcactgttcggttgtagtttcattcgtcagtgacctgcatctgcccgcccagtcttgagttcagctccatccctccctgcagttccgcagcctccggcttccccacctcagcttggctgagagtttcacgttcatccaagtgcttctttacagactcactcccagctggaggaggcagagggtaaggtacattttcgtgcactccggaaaagaaacgtattcaacaatgtccatgtagcttttgcttctctattgataattgctaatgtggtagtgagagctttgtttgtaggaagagttaatatcttttctaaaagggttttttgacagatggacattcttcagttttgctgtcttatttgttaagcaaagttagaaacataagtgagaacaggcgtggctggcctctaacactgtcagggccaggactcagggcctggccacccgcacaccgacagtggccagttattgccatcaccgtgcctgacccagagggtttggttgcccttcttttctgctgcttccacagaaaacaaattgattgtggcttaatcagatgagatgggaatgactggcaggtggggagaagaaaggaaaggccgagtgaggatggccatccatcgaggccacttccctgctctttgccattgaagcccatgctcctggaaccccgtgtgtgttcagaatgtgcaagcagaagaagaagagggagcggaaagcactgggcatcagggctttccaggggaatgtcttgacctggctggcagtggaaattcacaccttcagaaacctctagagttcatcgtggccaatcctgggacatggacttaggaatgcccaaccccgccacccagccgtggcaacccgattcaaaaccaaatgcaccaaatgtgaactcgaaggccatagcccttgccagcgacccagccctgaagcgggcatgatagcccagagaagaggcctttgatgtaagatgattcttaaatcgtgcattctttgccttgcttttctcggcagtatgtgttctgtcaatctgtgatctgagtagaaagaagaaagtgtattttcaaggtatgaggggcccagaggacactgtcccaaaagcagtggttgtgagagtggctttggagtcaggctgacagtctggaaacttccaggtccgctctgaagtgccggctgcatgaccagccctccagcctgtgtccgcttcggccttctttgtgcaagtgagagcattgctgatccccccggggtggcgagggggcgcacgtcagtgacctcgcatggtgcctgccaggcacgtggtccgtgtttcatgattctttgagagctttggagcagctccaagaagactcttttactttgaagaggtcccctgggaagctgtggtgggactggaaggtcgcaggactttccaaaatctaagtctctccagaacagagctgctccaagctttagtctccactcaaaagggtccacttagtaagttctcaggtccttggcttagtgccagcttcccagtagtttgtatactagatgccttgggaataaaaccagttccctaaacctatcccgtgctcacccacgacccgtgacagctgccaaagggacagacgcaaaggctccttcctcaaggccccctgcagacagcactttccacactgaaggtgtcagtgacccagccagaaaacctgcttcaccacctcctggataactgcataggatgagaacatagatttgggtctctttaaatatgaataggttacaaattgcctttttaaatattgcttgagatcaagtggtagtggttatatatggagtcaagcagctgggatattcattcaaggcgtgtaattttcttcattctttggacaaaacacaagcaggtttttaattttgaataattgatcttccctcccatactgtgggcaggtgttgatggttccccaccttgttagcctgaagcctgttcatccctggaccggccatgacatgcccagtgcagtatcccccacggtggggctggcagcagcccctccacactatgcacagagcagtctgagtctggaatcgtctcttcagccttacagctgttccatctgttattttctccaaactcctcttccctgcatttccaagcagcgtcttctcatgattacagtcactttcagagatgagctcatgctgatacccaatgaagaacccagttcagaattttctttttttttcttttttgtttttttgagacagggggtcttattctgtcacccagactggagtacagtggcatgaacgtggctcactgcagccttgacctccccggttcaagcaattcttctgcctcgccctcctgagtagctgggactacaggcatgcaccaccaagcctggctaatttttaaactttttgtagagatagggtctcactctgttgcccaggctggtcttgaactcctggactcaagcagttctcccacctcagcttcccaaagtgctacagctgactataagcgtgagccaccatgtccagcccagaattttcaaattaaacaaaactaaccctccaacatgtttcagtacagtggcctcaatacactattcctcatgcaaagccttcagttgaaagtgctgggtaacttggatttgcctgtgtgttgaccatcagttgctgcctaacagattatctgcagctctgtgggctaaaaccacagggatgtatgaccttcctatttctgtgggtctcgagtccagcacagcttctgggtcgcactggctcaggtctgtcctgaggttgcagttaagatggtgaccgcagtgtctcacctgagggctcagctggggctggagaactgggctccgggaggctccgtcatacacccgctgagttctgctgctgttggtgagaggctgggttcctggcctcatggttctttctgtagggcttcttgtgcgtctcacagcatagcagctggctccctgcagagagggagggaggaggaggaagccacagtgccttgcacggccgggtctcagaggtctctatgtcccctccacctggttctttttgtcagacgagtcactaagtccaggccacacgcaagggatgggaatgagactctgccttttgaggagtgctcaggaatgcatggccgcatttaaactgccacactgtggccggtcagctgggtctgttccacttcaggatccacaggcctctcctggccctgcaggacaggctcccctgcctccactccagcccgtcctggtggttgtgagccgcacttaaccctgccaggatgcggcttgtactgggaggcccatgggctccgagaggacttcccttcaacctccaggcaccttgaaactgcccagcagccaaacctcagagctgtggaagctcctggacgtttcaaagacccacttaatatttaatagtcagtgcagcattaatttcattgctccccgatcccacatatcgaaacctttcacagtttagtacagggatgatggtgaaagagaaaccacagggaaaatccgaggcagtggaattgtttaatttctggttgcttctcctcttatttgtaattaatatccattcagcatctttaaagcttacaaaatgcttcaagtacattctcattggagttccatgatttgtaaaacaggcatgtgaaaaaatgggaagctaaggaaataggaattcagaaaaggtacactgaaggtacgctgaaggtcagcctgaacttgaacccacgtcttctggcaccggacatccctgttcttgtcactgcggcactttgctctgtgtgtggaaagcgtgaagggcccctgcaaatggacatgatgctgcctcctccacaggtttatttttgtgaaatcaaacagaatactgtttgtgcttaaaaaccatcctgcgcccccatctgtaaaatacatcgtccccggtacttcccagcaggcgctaagcaccacccacactgccggcgcctgaccagacagctccatggagctcctgacccagcttcaacccgtcgggaacagctcccagggaatgtgcaggaaggtgcctccaacacccggccctttctgcccctcggcccctgtggtcactctgccctccacagtccttctgcccctgtggctggtcgcttactgctctgtgcatcttcctgaagcacttggcactgttgcctcatctctgtcctcttcctcctatgccctcgcctgggccctcagcagcttccagcagggagggtgtgggtgcagtgatttggatcatgcccctactcctcagagcctcttcccaaacgaaccgggtgtggcgtgctgggcctttattcttctgggacacaaacacgggactgctgattggtctctgatatagaccctggagtctgctccttttgtctggggcaaaaggaaccaaggaggaaattccagccgcaccacatttgcaaacgacacactgtcgggctttttttgcaataactgcatttcctaaataattcagtctttggattgagaacgtgtctgtcactttcctttatagaaataaccttttgtaaattaatgtactgttactttataaagccagacaactgtctctagatagacagcaataaaagctaccaactgtgaactgctgtttcttttcctttcactcatggatgctcttctgcatcacactgggacctatcaattgacattaaatgacacaccctacaaataaaacaatagtcactgagggtcagaaggttgtgtctgatatgcctatgttcctgtcaacaataggggctttctccagctgtccccttctcgggctgaagcacctcagtgacccagatccctgcaggcacttggcgtcgttttgtgtgtccctctgccccagccaggagagtgctttttgcagagggaggggtgtagcctgcctggtgtctccgtgtcctacctgtgtgccctcccagctgggtaggtgggtctggaggggtgtagcctgcctggtgtctccatgtcctacccctgcgccttcccagctgggtaggtgggtctggaggggtgtagcctgcctggtgtctccatgtcctacccctgcgccttcccagctgggtaggtgggtctggaggggtgtagcctgcctggtgtctccgtctcctacccctgcaccttcccagctgggtagatgggtctggaggggtgtagcctgcctggtgtctccgtctcctacccctgcgccttcccagctgggtaggtgggtctgggccaaaagcagctgctgcaggtggagctcccgtcactcacatgctctgcgtttgatgcctctgctaagatggagcctctgtttctgcatttatgcatcattggggtgggaaactctgtttccttttttctagacctttctcttcctgctgcccttctgaaggacctcattcccccttctcccctcattggccgtgatagtccacagggaacgtcagccccagcgcagcttgtgctgagaccaccatggccctgtggtgcgggtcttctctcaggccttgcgtgctcactacagaggtctggggtgtttctgcagggttttctcctccactcagcacgtggagagatcgcccatggcatggagagatggcccagacccacagagacctcgccgcatagaggatttgcccagacccctagaccccgccacgtgaggaggtcacccaggcccgtagggctcccgtggtgtgcggaggcgcagaacaagctcaggagtctgctgacctggtgcgccacaccccggggaccgccagtgggcgtgttcgaggctccgctgaccagggcgctgtcaggtctggttcgggcagcggctttgcctctgtgataggtgtcccgtccctctttcttcctgtgctccctctacactagcctaagggaagtcagtttcctttttttaataaattttaatttttgtagatacatagtaggtgtttatgggttataggagatattttgatacaggcaggcaatgcgtaataatcccatcagggtaaatggagtatccatcccctcaagcattgatcctttgtgttgcaacaatccaattatgctcccttagttatttttttaacgtacacttaaattactgtagtcacccttgtactagcaaacactaggtcttatttgttctattttttttttgtacccattaccatccccactccatcccccactactgttcccagcctctggtaaccatcctcctgctctccatctccatgagttcagttgtttaaagtttagctcccacagataagtgagaacatacgatgtttgtctttctgtgcctggcgtatgtcacttaacacagtgacctccagttccatccatgctgttgtaaatgacaggataccattcttttttatggccgaagagtactccatcgtgtatatatggcaattcctttatccccttgtctgctgatggacacttaggttgcttccaagtcttggctgttgtgaacagtgctgcagcacacacgggtgtgcagtgatctctgatagactgatttcctttcttttctttggagtatatatctaggcatggattgctgcgttgtatggtagctctattttttgtttttttgtagaaacctcaaactgttctccctagtggttgcactgatgtacattcccaccaactgtggacaaggggtgagggaagttaatttcatggtaacaccaagcctttcctttttgtcagtttctgttcttatgatcattcattagaaggcagattcactgaagaatgtcgttttacctagtttaaactggctagattcttttcaaggttacaattttgaaccccaccttgtcccctgagtcatcgaggtagcccaagataacggttaagaggaaacatcctttgtgttggcagcaaattgttctccagtttctgttaagtagtgtcccttgcaggtgaggagaggctgctttcatcctcagcaggtagagaccggggagtcggaccagcggaaatcctcacctcctggggtgggccgtgtggggagtgttaactggcaagacgatctaaattctctacccagatcacagcggctacagcagctttgctttcagagaagaaaacacaaaaaaaagtgcccaaaagttaaaaagcaagtggtaaaaccgggaagcgacacgttgcacaaaacgtatttggtacgttaaaaaggccagaagcacggtgccctgtaggaatgagactgacatcttcacaaaaggtcatcatcagtctcatgtgacattctccatgctttttttttaaagacagggtctcattctgtcacccagcctggagtgcagtggtgcagtccctggtcactgcagccttgacctcccaggctcaggtgatcctcccacctcagcctcccaggtagctgggaccacaggcgcacaccaccatgcccagctaatgttttgtatttttgtagagatggggttttgccatgttgccccagctggtctctaactcctgggctcaagtgacccacctgcctcggcctcccaaggtgttgggattacaggcttgagccaccgctcaatcccagaagtgttgggattacaggcttgatgcttttcttaaaaaacatattccccatgtatgatgtctgcagatacttcaagaacatcataaacaccactttcaccatcagctgggagcagagtccctccccattcactgtcgccccacgccatagggacttggtgatgtttacagtgtgtccctgtgggcgaacgggataaggaaaagatggtgcacatacactgtggaatactacgcagccgtaaaaaaagaaccaaatcatgttgtttgcagcaacatggatacagctggaggccattatcctaagtgaattaacacagaaacagaaaaccaaatagtgaatgttttcacatgtaagtagaagctaaacattggattcacatggacaaaaaatagaccagagactaccagtggggggagggtgggatgggaggaagagctgaaaaatgatctgttgggtcccatgctgactacctgggtgatggcttcaatcgtaccccaacctcagcatcacccagtatacccaggtaacctgcacacatacctcctgaatctaaaataaagttgcaatttaaaataaataaaatatcaaatgttttaatattttttaaaagtatgtgtgaacatcccttgacaaattgttttcatccagagaaatttgctgtactgagattatattataacaaagtcttagacaaaaattggttcccatgattttgtccttctcatttggaatgattgcagatcctggccaatttggagcaaggcttagcagaagacggcggcatgagcagcgtgactcaggagggcagacaaggtgggtcggccggactttgctgactagatgcttctcggacatcactgacagactgagcccaaagcctctcgcttcctctccttctcctttcctttctgtagtcagcactgcacgtgtccactcgtgcatttgcaactcactcctttcttggggaagccaagcacatcactgggtgatgctgtgggtgcaacgtgcagcctcagacccgaaccctgcgcccggggagaagacacgccttcaccacaaaagcacacggcccggaacctgccacgctgagtggtctgagtgggcgcgaggaaggagcccagcccagccgaaggggcccagaggggcctctgcgtcggggagagaggcctctgcgtcggggacagaggcctctgcgtcggggacagaggctcgggagggtgcttcaggaggagctggagaggaaggcccagagcctggggcaggctgagggacctgggcagttccctggagcattggaaaccccttgggggactgggtgggttgacatgagctgatctgcacagtgaggccatgccagctgcagctcggggagtgcgttagccaggagcaagcttccgatcatgcttggaaacctggcctgagtgctccctcccaggtagccccaccctagcctcactccctcactccttgtggcagcatctccccacaggcctggtggcctggtcatctcctccttcccacagcttctgtcctactcgatgtgcagcccaagtcaagatcgggtggtctccgtttccgcaggtgtgctggggtttctggggaactgctggctggtgtgagctgaacgtgtgtgaggtgtgtatgtgtgtggtgtgtggatgttgggtgtgcatgctgtggcatgtggtgtgggtgtggtgtgtgcatgtgtgtgcacttgtgcactctcttttcagtaatttaattgcaggtagagtaacaaggtctgaaggagagacggcactgtctgctcatggatgtcccattcagcattcttggcaaccagtcattttacccctggttgggctcctgctttggtgggaatgagcatgtagttatcagagagcagaaggctgttcctggaaatctaacagaaggtcacacccatgagcatttataaggagggtaggggaggatttagagcaggaaaggaatctgcaaagatcatcagaataaatatgcaattcattgagacaatccatattttacatccattaagagaagatattcagaatttcttttcacaaaaataatggtataaggggaacataagcagctaatgtgtttttcattgctgaaaggcaaagtgagttaagtttttaattctagcaattaagtttctgtgtgttctcctgaagcacaccgtaaatgcacatcatttctaggtgattgttatctcacagtggacgcttggtgccagcggtgggtcagcttcagcctcctaaatcacagcctcagaggcagccagggacacacggctcccagtgcccagcgatgagggaggccaggagcactcccagggcctggtgctgcccagggtggcatcttggcactttgcagttggaagtgtggacttttcttcgaggaagtagacacagcacaggcgcaaggagcgctggacaaggggtcagatggaagcgtccctggcctctgtggacctcagcctgcctgtcaataatatgttcatttcagattagctcagtcctcaacctgcgccttcctcctggtcatcccaatgataaacaggcaccattggtcagcccaccctccccccagggcagctcccaggggacctttgcagaccccaagaaggccacaaagccagtttggaaactactagaagagatgggccctgaaggtttgaaatcagtggagggatggctgctaactaaataatgtgcaggggagagcagggagggacgggccaggctcagggtcgcggtcagccaccgtgtggcagcaggtgctagggaaggaagccagctgcaggggagtgccgagtccccagcggaatgtgccagccacttgagttctggaacacggtgtagcactccttgggggaaccggcgtctgcaccagcccatggtcgggaggcaggggaggcctcatggctgggcatgggtggggccctccgggtggcctcccataggtcaactgcgagaggctggcggccaccctggccagtggccctcccagccttgtcgagctgcaggcaatgtcgtcgtttctgtcagctttgctccttttctcagggttctggctttggaaacggggcccccggtcggaccatttggccttgtgtctgggctgatgctgagcagccaccctcctggttctctgatgccgagggtctcttcccaaagccacctctggtcccaatgcgagtgctgtattttctgcctcagtgcagcctgcagcatattcagcattccaggccgaaatccagtggtgttaacaagagggatcttttaaagttaaattagaattcacaggacccagtaattgagggctagaaagagcctcgaatttatttgtgcacttacaggctgctcttaccttgtagcctctatccggctgtggaggtcacgtctgggccgggtgatgtactccatggcaaactgtctgctcctgatgaaggtacgtgggtggccaagcagggctgccatgtgatctggaagagcggggtcagtgggagccgcgagggagccgctggtataatagatgctggcagggaccggccgtgcagagaagccagctaagtactggcttaacagggagcccagtgacacattatggggctatatgtactttatttctactgcaagaaatttcaacagaatgtagaatttagatgatcagatttcattattgaaatgtgggtctaaatgatttaattaaaagtattgttcattttcccccatttttctctgaactccatccccagaaggtgtcctttgttctccctatcttcgtggagggtgtttttttcacctcatggttttgattttatgattgatgcttacaacacctgaagacaggcttccccacaagaccttcttaggacgtcaccccagagctctcagcccgcagggaaacagcttagaaatcaaggagctgaactgaggctgtcatctgtttttccgtgtctcctggctctcgccagcctgtgcaacggtgttttttggctcctctctttgtttggaacgcaccccacacctggctcacctcccacactgggcatcagggtgccctgtgtggagctagtgtccctgcagccagctgtgcgtactgagagctactgcaggaatcagctagcagcaggcgctccggagcagtgctcgtaacacctcctgggctgttcgaagacagcgaccttaactcccacacccatgcggctttcatggggccaaggtcattcctgagcttgattttcagcaaggcagagcaggcaatttaccagcggagaactgtgctcacgggctctgtcatgaaccctgaagtggcagccctgctttatgcacggaccctgcagcatccccagaggtgactgtgaccccgggcactgctccgagcaggctgggtgcgggtatagattcacagccatcagtggctcaggcattccatcaggaagacgtgcagcccgcaccccggctttagcgcagccccagtgcccagtgcggggccgctgcctttgcgcttctgcgtctacgtcaggctggacgcacaaggagactcggcgtcctgttcatcctcggtagcaagcgaccgtgacgcagcctcgcactactgcaagcctcagcctcctccttaaaataagggcatagatctgagatctctgaaatccctcccagctctgacattcacacagctctctcctctccttcaacacactggataaaggaaattacggttttcaagttctgtggttttgctcagagcaggtttttcttccgctgccactcctgagatagtcccactgaggtcaggtggcccgcacaggtgctttgttctggtcctcaccctcctcccacccgcccccttcccttctccagccccctctggcttctgcagcagggcttgcccacctctgagtgggagtgaaaagtaggccctcctgctcccctgccctggtggcctcttcaccacccaaggcttggccagcaaccaggtgaccccgaagcacccggcctgacccctctgcctcccaaaacaggccattctccctgtgctgcctgtggccagccctgacacccccacctggcggtctgggcggtccgcagtaggcctccacctgctgagggcattgtcagcgtcacctgaaagtcaccagcttgccggaacattcttatgcaaagacatgaagaatcaattataaattcacaggactgacgtttcactaatcatggggctaaaactccccagggaggaaagttccctgttccactggcgggctttcatttgcattttaagacacattaatagaaaacgacggaatgggcttttctttgtggcactgtggtagtaacaccaccaccaggctccgaatgtgagtcttcttcctgtattgctgggactcagtacagaacatattattgcatttcaaaaatacttttacaatggacatgatttaatttgaaagttcagcttaagctttcattttcatgagttaaaaaaaggaggcaaaaatgttgcaattaaagccaagccaagcatatgcactctcttgccatctagtgagcatacagggtattgcaacagtgtgtgatcttaataatatggggtatcctgttaattaaattatgtatatgggctaacaatgagttatttaatcagccatttaattatcttgaataacatttttattacagtgaaataaataccaatttaacttcttagcaatgaaatgtattcatacgttttagccctggataaatctgcatgatatgctataatgcacagtggcatgtattataaagcattgaaaatgtcactatcttcactttttaaatacttcttcctctccttaggcctcactgtagccttagggcacctgcactggcagaccatatggatgcaggtgcctgccaccttaggtggcttgggccccccctcccccgggtgcccctgggaggccacttccctcctggtgtccccacagctcgccagtatgcacatcagaacccgccgtggctccgcacatgatggaaaggagcacgcagctgcatcagctaccttccgtcttgctgaaattagactgcagaagtccttgctggttgcagaatggttgtaaatctagtttcacggcctgtaaacacgtgtggctgctgaaaagaaatggtgaagattgagctaaaatagacttgtccctggaagtaagtcattcatgtcctttacaaaagccaaatccacaggatctggagagtaggttaagctctcttgaggagcttcttttggccattttacctgtgaagggctgtttcctcttcagtaaataaagtcattaagtaaccgtcaacctaaggaaactttgtaacacaatcccaaatcctcatctgctgtattgacgatgggccccctgaagtgccccagaattcttcccccaactgcagcccggacacacagacacgtgtcatgttcacacctgagggactggcgagcgctactgttgctgagctggtgggagtggctgccggcgggtgcaggggcccccgagatcccttctctgccgcgcctgcccccggcctggaatccagcttcctctcacacggctcccaggcctgtgcacgtgctctttgggaagagccatgcctaaagtaacttcccatcaaagagcatggcttggtttcgtaaaaacctgtcttttgtcatactagattatcttcagaaacactgacccctggccctgagcactgaaagagcggttagggtgatgcggctggccacggcatcgcccactagcagtgagtgctgcgcccccaccacgcccccaccctgcgctctctgtggtggccgcctcagcctggagcatcagtggcgtgagtggggcactggaatgacccagtgacactgccgggctgataacaagaaagtcaaagcctgccttttgtttacttgaaaccaaaggtgggacatgtgtgggattagaacagacattgcccagcatgatgggtgctcggaagcctacttccttccccagagaagcctaggggggcagctgctacttttccccgagctggtgcaagctggtgagtgcagcctctgttggaaagcagggctgctcccctaaacttctcagatcagggccagcccagggtgtgcaggccccacagctgcatctggggtgccatgtccgtcccagctgcaacctcagccgccccgagtgcccccatgccaggtcacaaagccctcccctgtgtgagggagctcacacacacacgtccacacacacacatgctcacacacacgctcacactcatacacaatgctcacacacgcttacacacacatgctcgcactcgcacagctagacagcagagacaggcagcaggaaggcgtgggaaaggagaccgaggcatgtgctgtctggctcgtcatgggcgtcaggccttgaataaaattagttttaatgagctgtactcgaaggtactagactggagagagtcgttttgggttttttttgttttttccttcctaccaaactggaattgtacttgtctgtctttctttgtaacatcccaattagcaagccagtaactccagtcccagtttggaggaaatggaacatgtagaagaataaagaaataaaagtacctctgggattatacgatgagtaagtaagaagaaaaacaccattggtggccatagttactgctgaccgcgtgcttatagctaagtgcgagaatgcaggggagcatttagtgcagggcctgccgcacacagctcgctcaataaatgcggcgatcactgtcatcctggagagagcccgggtttgctggggacttgagacaagctaccactgtgtcccacgtgactttggcaagaccttcctgcacggagaccgcgttgctcacacctggaaagggtgactgggtccgctcagcgtccagcaagtggctgtgatgggccggcatgagtgggcagatggacagtgagactgtgctgccaggccttgcccttgaggaggggccacgggccagaccaccacaggcagggcagagcgatgaggaatccagcaaaggcctttggcagaaaccagatgccctgagcacggcagctggcacagcgctcctacatgttcccccgtagctgtctctaaaacgggaaggtctcatgcgtgccgcacggagcacacgacattcacgcactctgcaaggccgacctccatcacatactcagcctcagcaaacttgttttgtggtttttctttacatgtaaaggtttgaccttaatttctagcatagaaaacgtttaagagacactttaaaaatttggcctatgtatttggaggatggagatgagacagcgttcgccaactcacatgataactttgtcaggaaagagagttaggtgcagtccaagtgaaatatgaatcgctgtttagaagatggaagcaggaaacagaccctcaggcccaactaaaccgcgacagcccccggtgacaggcaggaccccgccgttgcgatgcgcacagctcagaatcccggcccgactgcagtcgggagagcagccgccccctggcagccgagcaccgcgtgctggtttccagcttccccgccagctcctgcgtcagcgtgtcctctctctacaccgcgtctgtatacacttgtgctcttctacacgtgtgaaacccacagtgctgttctcagctctaaagtacgttgggtttttcttcccacaggattatgtgctggccgtggaggcgtatcattcggttatcaagtattacccagagcaagagccccagctgctcagcggcatcggccggatttccctgcaggtacctgtgcacggtcagacatgagccagaaaggccttatgatagttctttgctcagatgggcgactgtttgcttttaatcattttaatataagaaagactgcagaaaatattccaattcaaatgtatgtgaccatgaaaagggtgggttctttccaggagttctggtttgactgtgggaggccctgctggcttttgtgcctgttgctaaatgtgaacccacagaaagtgtcatcacagccacactgaaatgagttactctagacattgtcctgctgcagttacgaaagcactgactaaaccgtgaggaatctcagttcagcttatcccgtaatagtcactcgctgatattttgcctgaaataacccttgaatcatgtttgctggacagacaaagtccagactgaacagtggtctcagtaatgcacaaagctcggcaggaccccctttgctaagaatgtccttgaagctggaatgcattttcctggaatatttggtgacagggaggtcacagggagtgatgagtcccgcccacatccctgtcaatcccacccttgcaggcggagcacagggcagcttctgcccctctcaccctcagtcttaggtcacgtcccaaacctgggccagggaaaggaggcacgagcaagggatggctgagcggggagaagcagcacagaccttccacaggcacccactcacggtgagccaggccctgcgctgagcatttcacctcacggtgtgactggcttgttttacagatcagcaaactgaggtctcctggttaagtgatatccagctacaggaggccacatagataatggggaagctagaatttgaacagggcctctgtgaactcagggcctgcactctcagctaacagctggtcctctccccctccacacagttgctcacacatgcactgacacacgtaggcacacgtgcacacaccatctcctgcacgccgcctgcttgtggaagtccacatgggacaccagatagtgttggaggacagccctgtccatgggcccctgtggtggggcacagcagatgactgtcactgaataaccccaggcaggcacagatgcgtgacgcgtgagctgccaccatgggcatcggctcctgcctgcactgggatgcttgcagcaaccctcgttacctgtgtgagaaagctctgtgtggccaggatctccaggctgcctcatgtgtaacattatcccctggttatcatagtaaaatagtacgctgggcctgctcagattcctcactaccctggagacaatctcggaaattttatttcagagtcatattttgcacaatttgagaagtagatgctgaattgcttttgcgtctggaagtgcttctccttccagggggagccactggcttgaccacagcgagggctctggcaatgaggctggagtctcaggagggaggctcagcttccacagtgtgatttaagccccatctggcgcacagaatgtgctaaccaggctgcaagggaagccctcggtgttcgcttttctgaggacacggggaggtgatagcggcgctgtgggcaagagcttttgccaaaggagaatggagaaaaagacggaagcacccaggccgactggactcaccgacgccccacacaagtgcctcgatctgcatctcttgcaaattatttatcaggcctcgctcatgggtatttttactgttgctgaagagcaaggtctctgaattctgtttttctaaaggaaatggagattgcaatacctagctatttgggatatctctgaagacgttgtgacgtggctgctacagaacttctcagacagcctcgcgcagctgacgactgcattgccatctgcacatacagaaaacccagccccagtaagttccggcttgggcaggtcagtgtgttgtctgaagatgctggatctgggaagaaggatgaagcaggcaggttttgcccttgaagaacacagccatttgtgggagtcaaggcccgagagcaccgttgtgatcagcaagaacgaccacatatcagcccagtggatgcccgagcacacagcagacccccacccagttctgaaacactcctgggtgcacctggacccgccctctccagacctctcctgtgttgggacctctcctcatctccgctgggttcagcagagggttgcagaggcgggaccctgtgtgtacacgtggtgctgagctgccagagatctcagcacgtccctcgtcccccgtcctgcgcgtagctgccattagccttccgggagtacactccaccctgccgtctctggtcagaggtcctgctagggccttgtggcctgtcaggtgagcccacacttaaagctcacattcagagccctagctaaccttttccagcccagtgttcttcgcctcatgtccttagtcccaccagacagttgatttgctgttgcccaaacgggaccacacttgctgctttgacctctcgtgggctgttcctgctgctcagaactcccttctctttctgcttgtgcaaaccctgcccattcttgagggctcactggaaggacttctctaaagtcaccccagccctctcagcaagctctcccttccctcttccccaaggcatctacgggggataaaagcacagggctcaggagctggggtttggaacaagacagaccccgaccctggtccagctgctcaggctggcgtggctctgagcagtttatctcaccttcatggtgtcagtccccccatacaaccgcctgccgtgagcagtcatcatcgtcgtgtgtagatgataaagtttatccatgtgaaatcctctgtgtcctgcctgggacatgccaggagcgctgtaagcgtaacttgctgtctttcctatgtcttgaggatgggttgtgtttgttccgttcctcacagatccaagtgtaagggcggcattcccaggtctcagcaaaagtacgtgtgctcagaattgcccttggaagccccactcccacggcggggcagccaccccatagagtgactccagtgcacacgtgggcacgaggccctccaggatgggctgtaggaaggggcaaaagccgtgtccccacgcacgtatccggacactcacaccccacgcgccagcctcagagctcctgctggcgcaccctgctcacccccaatgccgcatctcagcacgggatggaggacgccacacggagtcagattgcagtcgatgagaggtcagtggtgcaggacaagatggggttgaacggggactcgagtccagcagaaacgcctgaactaaatgtagacagaattgactgcgctctgttttaaggagaaagaactcaaatggaatgaacacgtaaaagccagcagagagctctgttccgaagggacgtagcgctcaatgcctactttaaactcagagtgttcagccacggttagattcttggagaaacagccctcagagaagtcactttcaagaaagcacgtgtgttttccagctcttgcagtgttcttctccctgaagcacctcatcagtacctgtatcttaattatacggtctctaaactggctgtgtgtgagccattctgaaatgagttggtgccactacggaagcaaagaagtatcacatgcactgtcagcacctgtgtgctgtgctgtcagaggggtaaatttcataagaaatacgtatattagtaactgtccctcaaatggtaaaataatactgcaggtgcttagaaagtacgggacgaggttttggttgcagtcagtggaatccgcagtggctgctataagcagaaaaagtttattcacggacagtagtacagggaatcttcatgagggcccagagacaggccattctagagccacaaagccaggatgccgtagcacgtcacaggcccctccagcaagaatagcactgccagctctgcctggcatctcagagtcttgtccccaccctgcagacccaggtcccccacacggcctcctgcttccgctgcctcctcaggccatgtcaccttatgtgcgtgcatctctctgggggcccaggctgcggggttgcccctcctgcaagagtaggaatgtaggcctcctggttcctccttgaaaggacccctgacaggtgggaaatggacagaatcggggaaggcagggccagcagcagtcatgagcatcccttacaaatcacattgtaacatctgaagtcatgtaacacaaagctaaacgcgcgtggaataagattgatttcgtttctctgagattagtttctactcttatgtgcatggagatacaagggaggctcggcattttctacaatcttgaatgttatctccagaccagggaggatttgggtttcatcagcattgaaggtgggagatgaggtgggcatcgcgtcgatgctgagtctcggggagaaagctaggaaatgtccccagcaggtagggaaacgcttggcaaagcacaaaggcagagggacccacatagctgggcccattctgctcacgccctggcactactgcaagaactgtggttttccgggtcaaccctagcgaggagggagcacaagcagagcttctctgcggagaaggcagatttccagctcctaagaacaccctgttccacaaggaagctgacgtgcccctccccagggacccacgccaaaaggccattcttccaggccagcgtcccagggcgctgctgtgcgtggttcgcagccccggcaaacgatggcctgcactgcgtgctgtccgccctgttcctgctggactctctgcactgtgtcctgatcaccctctcagctgatagtgggcactgcagtgtgaatcttctcatggacaacagaccaatcctgcctccaccagtgccgtcgccaaatcagtaacacagagcaacctcaaacatttctgaatgtttaggtcatctaatacttggcaaaagagtgggccgaacacctccaccctcagctttctcttctgtttgtgtgtgagtgtgtgtagcagagtctgagaaagatacatacagccaccttccttttctgagcttgggaaaatttgaacaagagcactgaaatgcaaacactaatcaaaaaggaagtattttccattttaattctaaagagtggaaatagaaaaaaatgattttgctaaaacaaaatatgcagacacctttgggaaaacgtgctataaaggaaccatgctaactccagagatgacccagccggacagaggtgaaaggggtggacggacagcaaggttctagatgattccacacagttgggctgagaacactgtcaccgcacctcctctttgtgtttaaaattttgcattgaatgtaggtgcctctgaaatatgcgagctaaaaataggaagctcactcactgaccacaccaacagttgcccggtcacacgagaagatacactggcgaatacaaggatggcacagatgccctcactttgtgttaggcctccgaggagctgactttcaattttaatatttcaaaacgtattctacttttgaatagcaatccttattctttccaagaaattcatagcataattctgggcactgagcaaagggtcacctgttcggtttgtgtgctgttcacattccagctggaaaccctggctcaaattacagaattgtacttggggtttaatgcctgcatataagggaggatccatctcccccctcggcctcgtcccgcaggcagaactatcatagccacgttccctgccaactgtcagcgcacccgccagacaggtgacagccgtgtttcaaaactcacatgcctgctgtgatcatttccacagtcccttcatcttcatcacacagagcctcctttagagcaccagggcctccacacagcaagggggctgggggttaggaggagagagaatggggcccagtgggaatttccagttctgaaggaaatctgtgttgtaagcaagattgaagtcatttgtattccagaggagtttctcacataatctaaattaaggaggggcagaagcaactgatcttcaaacagaagaagcattatattcatacttcttagaattacttcactccaacttagattccacctcagaatctcttgacttgggtcttagagggtcctcactgggacttgggactgagagggtcctcacttggacttgggtctgagaggatcctcacttggactgggaaagtagctgtggtgcgcaggtgcaagtccagcagccaagcacagacgaggggcctgtgcttggcattggggcagctgagcgcagggtggttctgcagtgtctgtggccagtcctaggcctcggtgtcctggaccaaaggtcagagcccaaggtgatcaggcaggagaaagcctcagccactgcaggagtggtgggaagttgggataaaccagccaccccaggcaggacgaagggggacgggatgcaggaccactcaccgctatggctgagaggacctcagcaagaaccaaggtcacctctgaccgagttcccagagagcaggaacccagggcagggtggggagacgctgaggtggaagaagggaaggaagggccagggaagcgctgtgaagctgggaaagacttgagcacgttttacagaggggcacgaccccaggctccaggaggggtgcgggcaccttgaccgtctcgacgaggagggtggttttacgcacacagccacgtaccagcatccctcaggttgtacgatctgaagacatgcaggttcctgtacatcagccatagctcaacagagaccttcaaatagaaaaagaagagactgacttctggctgccagcctgagccgtggagtgtgctggctacagtcagggaaagagtggggagagcgtcctccagcccctgccaccctgtgaggcctcatcatgctgatgtgacaccgaagtgcaagcaaaaagaaaatgtaggtaagtgggatttcaccaaaactaaaaactgttgtgctttaaaggacaccataaagaaaaagtaaaaagacaacctatggcatgggagacattgcttgcaaatcccgtatctgataagagacttacatccagaatatatgaagaactcttacagctgctaaattaaaaacgattcatggcactagcatgcagcaggggagagactggactcaactctgacttcacggaggacaggtgggaactgacaaccagggaccagggtcagggtcagcgtccctggttggaaaatcacccagaggaagcttcaagaaggggtttctggccaagcagacttgataggatcgttgctgacagccggccagggtggtaggatctccaggtgctaagacaccgagggcggggacttttcttaaactgacttagcaggattcttgctcacactggattctacaaggacagagaaggaaggcaaggtcaagcttgtctggtagaggaggcttctgcacggatgcagcctaatttatgcattgacagcctgcctggttcccagcaggccctcgggttctgcagagagagcaggtgagggggggtcaggggaaaggagagcacccctggggccggctctgctgtgctcacgccgggacgggaagaggagctggtgaaggagaactcaagaaaaacatggaagagaagctagggtactctgaaatagatcgcatctttcttttattcgtttatgtacattagcctggggggatttgcccagttggaatggaacagtttttctgataagctttaaaatacaagaatgttttataacataaaaatttagactaaagttttccgtgttggtttttgggtagggtttttctggtgggtttttttgtctgtttttgagacgaggcctcgctctgtcacccacactggagtgcagaggcgcaaatgcagctcactgcagccttgacctcctgggctcaagcaatcctcccgcctcagcctcccgagtagctgggaacaggaatgcaccaccatgcccagctaagttttttgtagagagggggtcttgccatgttgcccaggctggtctcaaactcctggcctcaagcaatcctcctgcctctgcctcccaaagtgctgggattacaggcatgagccactgggcccagctgaaatgagttttctgtatcaattgcagacctatgcttctgtgactaaagttgatcagtggtaaatatgaaaagaactgggttttctagctgactacagatttaatatcatctagcaacctatgtggctgttaacatagctgttctgtctttggatggtttaaaatcatctgactcccacaccacagagaagaatcattcttgccttcctctccagtcaacagctcacagccatggactgcaggacactccgccttgagaacactttaaaatggccattgcccatctgtaatggcttccgtgccaccaaggtgatgaggaatcccaaaactgtgacagagaagcaggtgaaggagctgagaactggagctctcccccacccctcagtgcctgtattagttggggctctctagagggacaggactcatagaatagatgaatctatgaaggggagtttattaggagaattgactctcgatcacaaggtgaggtcccacaatagctgaggagcaaggaagccagtccaagtcccagaacctcggcaagtctgctctttccaacttctgcctgctttattctggctgtgatggcagctgaagagatggtgcctacccagattaagggcgggtcggcctcccccagcccactgactcaagtgttcatctcctttggcaacaccctcacagacacacccaggatcaatactttgcatccttcaattaaattgacactcagtattaaccttgacagcgcccaaggaggggagggccagacccagcgcacagttccagtttctgccacggaaacactgaccatgtgttgctcttaaggtcggagctccagggcggcgtttccccgggtttctgcgtttataagtgatgttagtatctggtttgcgtgtgcacaggtgacatctcaaaaggatatggtggctgttttctgtcttcatataagttagaagcttgctttctctctctctggaaaacttgagtaatgtggaatgatctattccctgaaggtttgagtattcacctaagaattgcctttgctgagcacatgaggtgtgctgtgtgcttttcctaatttattattatgaatctgccttagtgttgtgtgcctgaggatttttctgtgtttctgggaaccattttggtaactgagagttttctagaaagccacctgtttggtccctgttttctcgtggattcgcacagagtaaaagacagtgctcttaccattatttccatttccttgttctgcctgtagctatttctacttttacatttctgtttatgcttcctttttctggattagtttatacactgttttttgtctttttctttgtgagacaggatcttgctctgtctgccaggctggagtgcagtggcacaggtatgattcactgcagaactcctgggctcaagagattcacctgccttagcctctcatgtagctggggaccacagtgcttacggccacacctggtgcttacagccacacctggctaattttcttttcttttttaatggagacaaggtctcactttgttgcccggtctggtcttgaactcctgaaattcagcgatcctcccacctcggcctcccaaagggctgagattacaggtgtgagccaccatgcccagccactgtatttcctttttaatagtgtcttttactgatttgttttctacatattctggaatacttttaattgcatttttatgtttaattttttcagttgctcctaacttttagaaatcggtaggattttgtatcctaattacattttaataattctgaaaatgtcaagttactttctaatcatcaggaaagtcagtgggtagcaaagaatatcccaagatttctctgttatcttcctctgagacattgagtaaagtcccatgccagcctcaggaggccttgcagtgcggaggatcagcacacggtctgggcgttggacagcctgggtgttgaccacagtgttctgtgttagctgtgtgacctcagaaaattgtctcatctttccaagcccgacgacttcatctagaaagcgaagctagcgacagcatctgcatcccaggctgtcgcgagggtcaggcgagctgtgcttgtaagcgcttgccacggccgccggcacacgttaatcttgatcggtcttgatgatgggctgtaatcatcttcagttcagtgtctcacacggtcctgttagacaggagatgcaggcgttcgagctgagggccgcgtcacggagcccatgctgccttcggtttctttttagtccgcaagtgggaaatcgatagtagtggacttcaaacggcttcggactgtgcagacgacgggcagcgatggacagatgccattcagtgtgtggtgtgtgtgcacgcctgtgttttctcttgtttcattctgttttttcttcctcctcgtatggtatttcttttgtgggataacagcaacagttgtgaagggcctgagatgttatcctgtttccaagctgtggagttagctgccactttcatggatgctggcaaaaaatgtaagattcctacgttagagaggaaggctatttattacacagcaacagcagtacagccagagtggcattcttcccaccagccacggggccctgattcctcagggtcttcaccgagggcctcatgaggcctgcagtgggctgtgtggctggagaggaatcctgaacttagaacacccaaatccttgctactgggaggcgagcctgcctgccctttgccccagagggatgcagtttagcttacaaggctgtcctctaaacaggcatccttgtgtaaatgctttgaacaaagccttgtcactgtctgtgcttggaagacatgcagaaacatgacacccatggagaaccatctccccaccagtcatctgagaagttagcaggcttgttttaatgctggacagatgcttggcgtggacagtctaagagttaactaggctgctcagtatgatagtgatgggtgccccagccctcctcatggaggtgagccgcgcgcattcagcttgtttctcatcgagacagaggacagcattctgttaagtttctgctgctgccatgataacagagctcgctgtcacattctggctcccgcaggctgtgccccggacacaaagcaactctgtctttaccctcgtgagcgcggcttgggccataataggacttttctttcatttgtatctatttcttattgtaagccttagatcatttattcccttccttacacttctagaggtgaaagaaaacccaagtctgcctttgtaaaaccaagctgtggcctcaggagtcagggctggggcactcagccttccaccccccaggcctcctctgccacaggcctgctgcatccggctgcatttcagtcgggcagccggtgggtttcctgacatgcgtgataagagtgggtttgagtttggtttggcttgttttttacagttgaattctatattatttggtcaaaatattactttgcaatttgcaaatgtggtggcacctaccattttactagccacaagtaactcataagttgacgtaggacctgctcatattataccaatattttaagtattttatgtttcatcttattagttattcattttattttatctaatgctctgccagaattcattccaaaaggtaaaaattactaaactataagactcttaaataaggcgtgtatattagcaacttagtttctgacatatagaacattaacattccactgtatcttaaatgtcttttgcctttttattaaaaaatgattaaatggttactgaagttttcctctgcctgacatataaatgtcttcatattctaacatgatattagggaactaaatatatgagtatagacttaatatttcttttgtcaactaaactgactaaattttgtcaaagcagattggagacataaaaacagctgaaaagtattttcaagacgttgagaaagtaacacagaaattagatggactacagggtaaaatcatggttttgatgaacaggtaaatattttaaaactaaatatatgttttctcaaatttcccagaggcgttcaagccccacttactgagttggaaagctccctagagaaggcgcttctccctgtatctcctcttgccctgtgtctctcagagcggagacccaaggagtatacaggtgttttcttgaatcgcagtgatgttcttttagtcacagaagctgatttttaaggagctattcccccttgttcttcagagaagcgcttgtattgcccccgttttcagcgtatgtgtgtgtaaaggtcaccattgctggcgtagcggccgttctggatcctgtgctctggtgttctgtgtctggatcccgtgctctggtgttctgtgtctggatcccgtgctctggtgttctgtggtagaacgcacagcgtcgtgcgagtgcacgttcgtgaggaggaaacacgccttggacaaagcctgcagccaggatcagaaagcgtaaataaagcaggtgtccgcttttagcaggaagtcatttaggtgaagttactctatctcaattaacaaaaactagagtggcttggccgggtgcagtggctcatgcctgtaatctcagcactttgggaagctgaggcacgtagatcacttgaggtcaggagtttgaggccagcctggccaacatggtgaaaccccatctctactaaaaatacaaaaaattagccaggcgtggtggcagtcgcctgtaatcccagctacttgggaggctgaggcaggagagttgcttgaatccaggaggcggaggttgcggtgagccgagatcgtgccactgcactacagcctgggcaacgagagcaaaactccatctaaaaaataaaaataaataaaaactagagtggctttaatgtgcgagcctgaatgcaaaacgcagctcaccgcctctacctggagatcaggaaccccgggccacacagggccatacgctgggtctctgtgggatccaaagcccctgtgggttgtgttgggggacagcagctcctgggctttccccgctaactgccaccgttgcttgtgttacagcgcgttccttcacctcgggcagaataactttgcagaagcccacaggttcttcacagagatcttaaggatggatccaagaaacgcagtggtaagatccccaagctgcaggatcctccatcctctgcctttcacagacgctagaaacatacacccacacacgtctcagcaggggcctgcgctctctctctccagtccaccagctccaggcagtggctgtggcccttaggggaagtgacccaacagggccacctaggctctgcccagcagctctgcaccacccccaggcccctaacacggcccagcacgcagcctggaatgggcgggcgtctgtcctggttgtgtgggccaaccctgggcgtgtgctcctccctaggccaacaacaacgctgccgtgtgtctgctctacctgggcaagctcaaggactccctgcggcagctggaggccatggtccagcaggaccccaggcactacctgcacgagagcgtgctcttcaacctgaccaccatgtacgagctggagtcctcacggagcatgcagaagaaacaggccctgctggaggctgtcgccggcaaggagggggacagcttcaacacacagtgcctcaagctggcctagctgcctccaacacactacgtcagaaggacccgggtctttgaaactgtgtcttgaagctaatgtattaatgtgacatggaggaactcaataaaactcctgcttcactggtgtctgctgcgtgtcttcttggtcccaagccacggcccagcccaggacttccccgcagttggtcggcgttcagccacgcagtccctgcagctgggtcactgttcatgaatgcaaggggcaggcgtgctgggaggacacagctcgtagacaggaaatctggagtcagcctcggggcctctgttctggaggccaatcctgctttgctcgttccttctggacatcctcagagaaaagctgggaggtgtggagaccctctcgccgtgcacctgcacgtacagggagatttacaacagggaagacaccccccacagatcgccgctcatgctcctcttgccctccccacacacccaaaactaagtgcgttggtcttacccatccgagtctcctccagcctgatgccagccaaacgacccctgccagcctggcggtggaggagaggccatcactgtttctcccatagtttatacgtccacgtggagagtgagctgagtggaacaggaagcacgacgcataatgaagcacaggaagagcgcgtaaaacgcaggcaggcaggggctgggggtggttttgaagccagacacgtgttttcatgtgttctctcatgcctgaaaggccttttgcccttacgtttacacagttattcctgcttttgaagaacttaaagtacctgaaaatgtcttcactttacgaaagaactctgccaagggttctctaaatatctagctttgtggatagttttaaatataattcattttacagactgtgatataaacatttgcacaaagcgaagccatatttctgttaatttttgtaatagagtagaaacatacaaacactgcatctaccagacagtctcagcccatttgctgacatctagattaattatgcattaaaagaaaagaaaaaagaggtgagacagccaaaaggactgttggacaccaaggaggtttcaagatctttctcttcaaaaagagaactgaaactattgttaagcccagaaagatgaagatgtaattagaagccctccaccttgagggtcttccttcaaatgtgacttcagggatgaagtgtaaggctcttcctctgctccaacctggcaccttactgcaggcatcttacaggatttgccagaggattatggagcccgtcctttacaggctcggggctcagagctgtccccggccagttgtgcgggaaagcagacagcagtgcccaggctccagctagacatgagcccggcaaatcagaaacagagatcaaagttccctagtaagctggtaagcctaaatccaccctccctcccaagccccacccccatgctgctggcatgaggccaggccaggtgacagtatcattgcctcgtttcttgcctggattatttcttcctggtttttttgtttttttttttttttttttttttgagacaggatcttactctgtcatccatccaggctgaagtgcagtggtgcaaacatggttcactccagcctcaacctcctgggatcaaacgattccccactctcagcctcctgagtagctaggaccacaagtgtgctccaccacgcccagattttttttatttttataaagatgggatctcactatgttgcccaggccagtccctaactcctggcctcaagtgatcctcccacctcggcctcccaaagtgctggggttacaggtgtgagccatggtgtccagctaatttttttttcctactgcctgtatgattgcagaattttttgttttgttttgctagaagaggaaaacggtgctgtgagtgtctataacgtctgggacaattgtagcttatctagtttacacttagcttttctttatgttaaaaataaattatacatcccagaaatcttttctagagccaattgaagtgaatggctaacgatcagaaagcttattttctaactggaaaatgggaactcgctgagttgatgatgggctcacaactgtggaaatgcccaccctggaatgcacagtggagaatgaagaagccagtaaccctgatggcatcgttaccgaatggccagggtgtgccaggcggcaagggtggatttgctccctgaatgatccatccagctgaatcttgagtcattccgcgtttgccacgaggggcagtgttagatcagtggtcctcaaagtggggtccccgaagcagcagcaccaggttctcctgggaacttgacggaaatgcacatcctcagccacatcctctgatcacagaggagtcaactgctggggcctgggctgggccggcccgacagtgtcgtctgcaccgccctccaggagcttctggtgctcctgcaggtgtgagaacgcatgtcagacgccggaggccacagacagaattccagttacacagcaggcgttggagcccatgggcatcgccatcctgccttacactgctggcctcttctatgccccctcgaggattgtgcccccacttgttctctctgcctggacccctcctggcatgcaccttcctagtccctattcagtgtcaccccctgaagcctgccctcaaccccaggacagtgcagccccgtccacactccccttacctcttgtcctggacccacacaggctccgcagcacctgctcctggcacggccccacagttgcagtacttgggctggagctgccgccatgaggtcctccttcaaacacccagttccagcgttccccgggaagcttcccatgccatcttgtcacgtcttgcacccagcaccgagggtgaggcccggcaaagcagagctgcaggggctcagctgtgtacaccacagttcttgagacgcccacctgtgtgtcctccccgatcctgctccacaggtccaggcccaggcccagaggtagcccctgcgttcccgtggcttcaggcacacgtgtgcagacatgacgccgagaacaccggctttgccaccaaggacagaagacagtctgccccacccggggtcacctgcaggtcctgctctgaccagggtccaggccctgattccggggatgcgacagcacccagaatgtcctgccttgtgtggcacgtgggaccggggactcgggccccagggctcccaaccctggctgtggagagtgggtggctccgctgctggtcgggggcactgtgtgggcagacagcgtgccagtggccacaggatgtcctgacagcagaggcgctaaacactccaggagcgcctcagccccaagctctggttccaccccttgcgggtgagggaggcccaatgacagccagactccatcagttcagaggcaggggctagagatggatttaattcaacttaaaaagaaatacaagaatggaccttttctgcagtcctgagggagtggacaggttgcgtgcgtgctctgacggtgggatccagaccccctcctctcctgcgttgaaggtgccaccgggcctcatccccagccacatcacatcctgagcctcttacaggcaggccccgaggtcctttcacctttctcttctctccagtgcttggtgcattttcaaactcagtacctttcttttgaataaatgagcaagaataaacccggtgctgcttgccgagctcctctccctgggcggggaactaaagcaaaaccacgctggatggggtcccaaacaccctaagaaggccgagctcctgccgctctccagcacgcgcaccgaagaccggagggagggtctgtcgctctcctgcaggagcacgagtggagggagggcctgcggcgctccagcaggagcatgaggagtggagggagggcctgtcactctccagcacgcacaccgaggagtggagggagagcctgtcgctctccagcagaagcaccaaggattggagggagggcctgtcgctctccagcaggagcacgaggagtggactgccggcccgtcactctccagcacgtgcaccacggagtggagagagagcctgtcactccagaaggagcaccaggagtggactgcggacccgtcactatccagcacgtgcaccaaggagtggagggagggccccttgctctccagcaaaagcaccaaggatcggaagtagggcctgtcgctctccagcacgtccccccccggcagtggagggagggcccgtcgctctccagcatgagcacccagagatggaggaagggtcagccatttgtcaggctctgcgtgtgaaaagctgtgatttcatttcttatcagttattactgtcactatcactcaggatgaaattggcctcacccgctcaggagcaatgctgccttctccctgtcctcctcctggattgttgaggaaaaagccagactaacctgttccacaccttggcatcagttgcataaatgctatctcagcatgttctagaacacagtactgtttaaacaacgttctgggggtaaccaagtttataacttgcagacccgatggccgtaaagcatggggtgggggggtgcctgcctgcattgcagctgtcagagctgcacagagcctgcgacacccagccatggcttctgcccaccaggccacgtccctccgctcctctgaatccttccagttcttcttaggccacttaaacgccaccgtctccacgaagtcctgtcggatcaccctcataggaagtgacaaaccacgttttgaacccctctccccacccagcaagcccctagcccgcgagcataggatttcctttctagaacacgtgttctgtgaagggccagaggcaatatttgaggcctcgtgggccacatgctgtccctgttgcatatccttttttttgtttggtttggtaaactgcttaagctggcagaacaacagaacccgcacattctccacgcagcccagcgcccttggccatgcagggctgtgccttctgccagctctggaggcccaggggctggcatgggcctcccgtcctgagccccccatgtacattgcacccatactgggaacgcccccaggatctgctgcgagacccccaaggaccagcttctgcagtcctggaagggctctcctgacccccaagtccgccatcttctgatggtggcaggtgggcacagtcactggctgagcgaccaagggtcagtgagattactaggccggcgctgcacccaactgaaatgaactcacgtgtcctcacaactcctagcagcagatgctgtcagcctcgcatcctacaggaaaggaaccatcgccaaaagacgctgaggaacatcccgagggtcacagggacagtgcagagccaggaccagcccggcccatggtcccccagcgtgcaccacctggcccggcactgtgtgctcagccatgaggactgggaagagtcctgcccacagctcaagtgtctacaccgcactgccatccaggctgtgagccgctgctgagcatggggaatgtggctgctgcagagacgttatgaaacacttctaaaagaatgtaaaagatctcattaataattttgagtacctgttaaaatgatagtaattttggatctagtagattaaataaaacatattattaaaattaagatgacctttgaacatttttaacgtggctactagaaaactttaagttacgtatgtggcgcccatttgtggctcccattctgtttctgttggatggtgccaaagaaaccaacacgtaaaagcccctgcagaggagccgctgctttgccaatggttagtggtcagtgtgggttctgccctctgggttcctggcaaccagggctgctctctgagggctgaggttgccacgggctaggcagatactggccctgcagccctcactctccggagggcgtggggcatgggatgggatgtttcagaggacgtggggcatgatgggacgggaagtttcagtgggtgtggggcatgatgggacggggtgttccggagggcgtggggcatgatgggacgggatgtttactctgctccatggccttacagtgttaagtgtaagtcagcattgaaagcagttttccctggaacatagaattctagttgatgcggatccagaaccacggagggtcctacaactgctaggctgaaggctgacttaccaaaggccacagagcatctctcccccagcaggttcctgtggcacttgcatgtgtgtctttttctttttcccccaaataattttccagttttattcttttcctttgacatagaagaacacaattaccgagagaagaaaaggaaggcgagggtgactgcgcgcctccccatccccacccccattcccacacggctcatttcaactctgggagggtttacaggtaagaatgtgaaaatcagaaacgtcaggtaacttttccaaggacccacagtttaaagcgggagagagggagggattccaatccaaatctaacagtgaggctcatggtggtgccacgatctgtgttgccgtttcacacactgcatattgctttgcagtggagagctgaatccacaggcagggccggacccaccaatgggctgccgtggataggctttgggctccagcaccacacacatggccacacgcttacacatacaacacacacatgcactcacacacggaggaccgtgttcacctgcgtctaggtcctttccacctcgaggtttacctttattggacctggaacccgattacgggcagtctgttcccgcgtcgcccaccctcgtccgtgggagaagtgccatctccgggaccgtgttaggcgtccagcacagccagccaggctctccagcctcactccctccaccccagggccccgaggctctgcccaccgagatgacaccctgcgacctccaccctggctccttctggtcaccctgacacccactcctcaaatgcccacagtgagcctggggtcctgctgcctgtggagtggacccagtgcgtctccctaaagcctccagctggcttggcctttgtctcagcctccacctgcttcccggggtcagggaaccctgccagctccctgggcgtgctgagctggacagtcagcgaactgcatccctgaaccctcgcccact

SEQ ID NO: 633 - DNA, 729092 bp, Homo sapiens
  source 1..729092: mol_type = genomic DNA
ctctggtaactgttgtgggtattttttgcagtttgggaaactaaaaaatatagaaaactgcaagaaataattacagtcaccaatatgcttgccactcagaatcaaacactgccagagttttccatattggcttttctaggcttctatatgcatctatatctaatctggatctgtggctggatctatatctgtagctatgtgtgtacctgtatcttgatctattgtgcttttgaaaggaaagtacgtactcaagtccccggtgaccagcaccctcatgctgacatcagatgtcaaatgcaactccagttcaggtcactcttctacaggggatgtgtatcctttctaccttttaaacatgttgttatagacacgttctgaggcatagaaaatttataatttggggggacattgtctacacaagtgaggttgggctgagcccatcatcctgcaatgtgttgtttcattcaatggcgtatttttgggctctgttgaggttgacacacatggatgctgtttgttccattcagaaacagcccaggtggccaggccctcaactacgctgaggcatcctgaacggaagggctgaagagaccgccctggggtctccaccccctactgcagccagaccttctggggctgccttccctggggagcctcgagcagatgctgaatgagctccaggaactgagggccactggacacccgcccccacatgcccccagcccacaccacatcacagtgtgctcccatcattcactgagcgacaacaggaggccacagatggaacaaaaaatttgttccttaggccggaggccacagggtgaccttgctcccagcgagggaggtttgggcctgggacttcaggtcctcaggaagttccctcagccccgcaggcctcctgatgccaacatgactctgccccatgggaggccagggcagccacttcctggctctgcctgtttggccaactggcctttaggaagccccgctctctgtcccccaatactccatgggagtttcagtgcccaacgggcacctgacgagcctggtatctgctggggaccaagggctgtttatcctccctgggacctggggagctaagggtcaacacagccagaagcctgcccccagaacaggactcttgtgggtagtgtagacacaccccagctctggccctcaagggagatgtgagccgtgtgctttctctctccggtcctccctgaggaacgcagggccagctgcccactgtggcggcagctcgggcccagtcacactccttcactggtgatctccctcccctgcaggcctccttccacctcccagacaagctgctggtgaccagattcctgtctcagcgtttgcttatgtgagatctctaactcagaacccgtcccttcctgggtccggcttctgctgggaagccagccacctgaggtgggggctgacgggctgggtgggggccccggactgcactgggctagcagatgcagggaggcagggagggggaggcaggccatttattgaagaactgcttgcagacatggacacacacagccatggtaaccagacgccaccctggggccagggagcacccagaaacagccctgggctgccagcccaggcctggacatttgcccaccacgggtggagggcctctcttggcatcaaccatccacgacctcctacggcaccatctctcctgccaagttgcccatgggggtctccaggaagaaaaccagccttgggggattccaaggcccagggagggtgggaagctgcccacgccctcaggctgtgcccagtctcatgctcaccatttctttctatggccaaagggaagtcgctggacgagggaggtccctctgctgggatgagcagcacagcacggctggggccccaggtcacagaaatgggtgcagggatcctgggacctgggctggatgggcacccgctttgggatttcctctgcttcagcctgtgtatggtccagggaacagtgtaggaaggggcgtggcatggggtggggctgccatgtccggggcttctgcgtagcccagcaaagatgctacaggaggaacaggaggagagggctgggaggggtctgggggaggaggaggagatggggctgcagtgaaggccttgctcattgcagggggtgtgggaggccaggcagggtcacctctggccctgcagaaagagggacggaagtaggcgggctcaggcctgcgcctccagggcacacacgtgcacactgggcaggcagaaccaagagggtggcagctccttgctggtgctgtcctcgtggaaccggatgtggaggaagaagtctcccgtgtagaggaagaggagggccccgaggcaggccgactggccggacggctgcacctgagcagggaggagaaagacacatcagtctggtcagcagcaggggccacccaaagccaccaggaatcctgggaatctgcctggacataggtgttatgggggaagcgagggccgcccaggcctggctccagtgccccctccagcaggtcactgcgcctctccgagccagttttcatcttggaaaggagctgccaatattcccattcctgaattgtttgggggctcagggggtcaggagtgtgggagggtcaggagtgtgggagggagtgagggagaggttggggcagaggggaatggaatgttagcctgtgctggggcctgacagtgaggtgctgagaggcagcttgagaggtaggaggtgggaggtgggggctgagggcgtagggctggagcctttccgtggaaggagcggcaggcacgggatgggtgacagtgacatcacagtgatgccacagcagggtccaatcatggagcagccccctgtcctgggcacagctcccattccctgcacattttcctgcttcaccaaccctgagggcctcactgtccaggactgagagacaggtgagcttgtctaagttcctgcagtgaatggggcagactcagactcagtgtgcacacgtgaccacagaacccctgctgctatcgtctgctggacatatgctgaccccaaagcccaccacccagggaaggggggatgatgaccacatggccagaggctcccagaccgccttgcacaccaccacgcaccgcgtcgaggtagaaggtgctggagcccacgaaggagacggtgtcgtgcaggtcgtagttgtgcacgccgttctggtggtcctggaaggggaccacagtgagggcgaagggccctacgctgcgcgggctccggttggtcagccgcacctccaggcgcacggggtcgcccacctggcaggccgccacagcctcgcggtcacatggctgtccgtccaccagcacatctgtaagggacacgagactgtcgggggctgggctggcctgcacggcccagccggcctaccccacccactcgctgattcattcatttcttccctccttcactcttcaaggctgccacccactccctgccaggctggacactggggacacagatgtgtgaccagttcctggtctccggaagaggaacctggcaaagacgggtgtggtggctagagctatgactcaaggggtctgcaccccaatggaggggcctctgggagggcctcctgccacagcccacctagaaggggaggagctctctagtgagtcagggactcctgtccaggtgagagtctgacaccgtagaggcgagggcgtggaaggggccctacaggccctaaagtgccgcaggtcaggggtcaggtgagctttggggcacaggcaggcccgaggtccctctcctccagtggctgcaagaccacacaccccaggaggtggtgtcttgatctcgttccccaggaggaatgcacagtgggctccagcactccctataaagtggctgcactgtgttttcttcattctgtcagcctgtccagggtgcctgacacacagctcagcacagaacaggtgctcagggaagtggcacggttctgggacccgtggaccctgccaggcagggagctggtcctgggcgaaggagcatggattcatctcctcttcccttccttgcttacatgccccaagagcttgcagacaaggaggacgcctcctaactgggcagcagcaaggaaggaggctgaggtcagggtggggtgggggcggagagagtgtgccctctctcagggaagcgagctgatgatcagggtggcaggtttcatggtgatccccaaaagatacgtgagaatgtgaccgtattggggaaggggagtctttgaagatgtaattaagtgaaaggtcccgataggagctcattctggattagagtgagccctgtagtgagtgacaatgtccttatatggggcagaagaggaggaagcacagacagagacagaggctgagactagaggatacgggcaggagccaaggagccctgggtggctggagcccctaggaactgaaggagggaagaataagcccccagaacctcccatggtcctgcagcaccttggtctcagccttcctgcctccagaactgagaacacacatctgttgttcaagtacccagtttgtggtcgttcgctgtggcagccctagcaggctaagatgtggggtggggggcccttcctgctgggcaaaggccacctgctgtggccctgttgtggaggtcctggaagtgggaggtcccgcagcctgcaatttgacttcatgtcatccaagtacaaactgcgtggccctgggagccagcctgagccccatggtctgccgtggctgatcctgtgctgtgggctatcaaggcaggcaggtggaataaggatgacatgatggtgacacgcatagggagagcaggtgggccacaagagcactcccaccccttctgccccttaacacagtcacgggcatcctgggccgggcctggtgccagcaccctgcagcggaggatcctggaaacaccctgacccacagccctctgcccttgacctctgttctgtggctgcaaggagggccctgtggggtgtcctcactgcagcctggagaggaaggtcctctaaggactggcctgcctggctcacacggtcaggccagagcaggcaacttcaggtgtggttgggcctcctgctgtcctgcctgggttccactgccctcacacgcaggtgaggaggaaagcaccttctaagaccccaagccactctttcgacccctgaagaggatgggggcagaggggacaggatattgaaagtccccacacccaattcccagcgagtcctggctcagagcctctaggcctgtctcctctgccatccagggtcctgggttcacagggaggctgtgggggcctggcaggcagcagaggatctcgtggccaaggcacaagaagaaggactcctgggacatcagtgctctccatagcccgtgtgccagagaggtttaagggtacgcaattctgaaacattcatgtccagtgcgtccttattttctcatttgagagaagtcagtgcgtggcttatgataaggagatgaggacatggcctgtgctattagggagccacctgaatgtggctcgtgtccactgttttccagtgtaagtgactgatgcacacctttttatattgagctctgtctgaattctgagtttatgttcctggaacagtgaggcagatgaaatgggtggcacaagagaaataaacatttctaagagaggctgataggtcagactgccctccaggaaggctggaggcctgtgcccattccccatcctcagggctggagctgaaaggggctgcagaaaccatttggtcccattcattcattccaagatttattagctggctgctggcccttgcagccagtgtgatgagcatgacccactgttgagcaagctcacaatccagtgggagaaggaacgctcagccaagagctggggcatgccaagcctctgcatgacacagcactcaacaggtgcccactatagggcccagggaagtagcccttcactctgtgccactgtggggatggcatcagggaaggcttcctggaagaaaggacacctttctctattctagtgtttttcaaggctatgatttgccctcaaatcccagcttttgctgcatcctacacttctggatgtgcagggccacctgcactgagtctgaccaggctgggataaacctgggggtcctgaggccctgctcactgggctatgtatagtgcccctgagtacttccagcagtgcctgatgtgcagcagacagcatcaagacgggctctttgttctcccagctggtctgtcctgctgagtccagaaggtaggaccagaaggacctgagcttgagcgcttctatctatgggaccccagggtatgtcactacacctcctgggcctccgtttcctcttctgtaacatggagccaattctaatgctaacagttgtgacaagttcatattcttgctgtgaggagctcagtcacagcacgtcccagtacccatgagcatttgagggactttgtcttgaggcccagtgctgttggggcagcggctttcgtctccagccttggttacctgtctgtgctgtgcaacccagcacagggaggctccaatccatcaccagcccttctccctcctctacctctgtgccacccaagccaggcctcagtaaatgtttcttgaacagtgaaccgaaccaggcgcggtctgagcctcttgaataaaaggtggggagatggagagagcagatggggcagcctggttgctggttccattaagggaaagatacgattatgtgcaaatcagtgaagggtagttggctcagtaccaccctgccctgttttttttttttgttttgttttgtttttttgcagagaactgtgtgggctgctggggcagcagaggactggtctgtgggctcctgggcagagccacgctggcctgcctgtttaacccttcctagccccagctctgtacaaccccttgggaagagaaagctgatgaaggcttggagccagctgtccctgtgaacactgctggtggaacctttctttgctactttctaagaagaggggaaggaatgtgtggcacttaggtgtgaggccagggtggtaggggttggcaggggttgtgggcagagccacaccctgtcggagcaggaggccaggctgcagtcccaactttgcctctgacttcccttcaccctgggaaaggccgtttgacaactggtgccccctccatctcatctatgaaactgggatgatgatcttgacctcccagactgggggcaggggtgaagagcagagaggacccagccagagcgagcactcctgccacaggctctcctgtgtggccagcattgcagaaggagggcagtgctctggaatggcaggcagcacctgtcttgctctctgctctgtccctgctcccagggtgaccaactatcccagtttgcccagggctagtttggcttttagcctgcattgcaggaaaccctcagtgccaggcaaactgggacggtgggtcacattaccccgaggcctggcatccacaatgactgccgaccaaattaatgcatttctgtgctcagcaagcagccgtttccttccttgctccacagctggggcagcccctacagctccggcagctcagatccaggcatacaggcaccaaatcccctgacgctgactcttccccatgacacagaggaaaagcaaaccttcctatgacggggcagagcagaggtctgtttttgtccgagagcattaagcttcctgaattcaaaaggatgtcctggtctcccctgggacccccagggtacagctgaggaaatgtggtggaaacgggtctaatgaccgtgatgatgatggcggcgatgctcgcagctgccttgcaatgagaacatgtgaccgcatggcagggctgtgcccgggtaggattcgtgaccccgtcagcagcaacaccggccacatccattgttgccaattcgcttctctgactctgggcccgaacaagcggtgtccagtcctgggggatcagaggaaatgggctcatttctgcagggccccactctccacagccaccctgctgagcagggctgcaaggagcatataagaggagagaagagaagccagggccaccgtccattacaagatggcttccccgactccaaccaggacggacctgggataaataatgggaaaaatttctcaaagacaagctgctttggagcagtttctaaactgccgctgggggacaggaaggaaccacacgtgaaagcgcgggtgctgctgggagctcaccccgtctgtggcccgcgcaggggctggctctactcctggctcccccagcattcggcttctatcggcgctccccaggcaggccctgagggacagagcgggcagcccaggggccacgcagcctgcctgtcagcttcagctgagaagagtgggtgcctcctgggggacccgctgctcaatcacaaggtgagccctagaaccgggacccagttctgtgaccgcagcagcccggccggctggtccccaggaggtgggcagggatgccagcgcatgtgtcccctccctcggccgctcctcaccaccccgcagagcaccttcccacagccttcaggcgggggtcatcagccctccccccccccccacggaaaaccctgagtctggtgtctgggtgtgtagggtccagttttctcccactgttctctggggctggcccccgtcgggcttcctgccaccctccatttcctggtccaccaaatgagccgcctcttggcaggactggctcctccttccctctcccaggcgggatggggcgggatttgcacagctgcttgtcgaggagctgttagcagcacaggcccaggctcctgattggctggagaacggactgtcttgggtttgagttacttctctgtgaatctccacctctctgacgccccagtctttaggtggggtagaaggagaccacgtcaagtggggttttgttaggggccgcttgatcctaaccaccatggctcccaaccttccctgaggaggggaggatctgcaggagcagcggaggagaactaggacggggatgctttgcatttcgacagcttctccagggcccttcctctcccgcgggctggctgtgaacactgacgaagctctgtgccggatgcaattgagaggaaggacgcagcaggggcaggtccttccagcttctcccaagccaggtgccaggcaggcagtttcagcccactctgaccacgagggaggcagacccagggcctctggggatgttgggtccccttaggcctttttgcctggacctcgaatgccctatcccagggaagcagcagcctagggaggggaaggggctcctgtgcccacggcagcccgtggtaggggggtcatgagctgagagacagaatgactaaaggtcgaaacatgcctagcaaagcctcctgaatccccaggacttccttcgcaacagaaggggtcatgtggttgacaaaataatgtgccccctccacttgcccatgtcccagtcccgggagcctgtatgtcctctcccatggcagaaggagcttagcagatgtgatgaaacggaggtcctggagaaagggagaagaccctgggccatcggagtaggcccaatggcgtcaggagagtccttacaaggcaagaagggaggcaggagaggggcacacttcgctgctggctatgaagacgggggaaggcgcacagggtgcaggcaccccaggagctggagaatgccagcccagggaggaaggtagcccgcaacaccgatcagactctggaccccagaaccacacggcggggttatgtgctgtttaagccactaaccttgtggtcacttgtgagagcagctggtgagcccaacacaggtaggggtctgaggacacacacagagcccccaaggggccccagtcagcctcagggccaccacttcccaggccactaggggagacccagcctgggcgcagagctggtcctggggcagacggcactgggtagggtgcacagctctctgagcctcggtttcctcatttggaatggtcgcaccttcctctcagggatgtggagtgagtgtcagatcctctatgagaggtgccagacagaacaaggtgttctaggaatgtcggctcctgcccgcccccagcttctgaaacccaacgcgccccaggctaagatcacatcattcatttatctaacaagcactggagaggccctgagcctcaggcccgtgctcctctgggcaaccctgacatctcgaccgggcaccacggggtctcaccctccactttctcctcctgcccctcttccccatgccttccccagtagagtggctccaccaccggcagcagctcaagctgggtcctctcctcccggacacccagccccagcctgggaaacgtccggtgcccatgcagttgggcctctgctcagcctccacccgccccgccctggctggccgctccctctcctttctgcacgaccacagctctagtgtgagacgctggtaggtagtgtcacttccatgctcctcgcctgcctggcccgtggcttctgtttatgctcagaataaaagaaagtcttgatgaaattctcaccccaactctggtctcctcggccctacgagtttcctcccagagcccgtctcccgggctgtgtcctccccgccactgctccctggccatcctgtccctccagcacatccttcctgtcccagagcctctgcacctgccatcctggcctccctaccagctccatcctgacggtcaggacttggctctgccagaaaggttgtccctgaccacacagtagagggcttcctgcccctgccagccactcggccacattcatgtattttctcatggccctggcatctgatctgaagcgaccttgtttatcgatttgtttcattgttaactacccgtgttcctcctcgtcaggaagctctaggaacactggcacttggccgtctcattcaccgtggtgtccccaatacccagcacaggcaggcaaatggcagacacaagttccatttcatatctgctggacacatagatggatgagtgagtgagtgaatactgggctttggggtcaggtacccaggtttgaacgctggccccaccaccgactggctgtgccctgccccatttaaacccctagtgcaccatttggcacatgagggaccagggccatgtcccagaagtgcgtcctgaatgaggactctaggccgagctaccatgctccgctctgggcccacagatgacttatgcaggagaacctcatgttgtaaggaatctcctgggagccaatcagcctccttcctcaaggcgtcacatcggcaccggccccctcttccctcctgtccctggccctgcttctgtttcacatttaataccagccagagttacggacataattgtgtctggcccagaattcctcctgaagtccctgctatagcacgtccaggctctggtagaaacacgggctataagtaaaggctgtgcccgccagggaggggcttggcagggcacagagaaaggaagccattggccagcctgtgcatggggccagggggccaccgtggggctgagaacgaggcaatgtgcgcatgctgggcagggggaggcaggctggtcgaggctcacaggtggtaaagtgtgtctcactcagcgcccacatcctcctaagaggtcagagagcaggtgcagctttatttgcagaagcacactgaggtgtagagaggtgacaggagctgcctgggccccatgcgggccctgcggaagcaggtccgggagccctgtcctggagagtggtaggcaggggaggcagttccagtggtgatgttctacaggataaggcccacacgggcggtgagctcaggtgctccatggggacggggccccaactggagccatcctggggcagacccgtccttcggcctctccacctccggctgtcgtgacccgtgcaggactcaggctcctggagggcagatgtggtgctggtgcaggccttccagtctgggctctgccaaacactgcttccactgtggtctggctgtgtcaggagcagcaccaggaggggtgaatccagggagatgcagaggcccagccctgggcagctgccattcccatttgattccacagcttgggactccagccagaggtttctgtgaccccaatgagccccaagaggagggtggaggatgtgggggaagaggcctgccctacctgcacccacggcctccccctcctccagcctgccccagcagggcactcccccttgggcgtgacactccccattgggcatgatgctccccctgggtgtgaagctccccccgggcgtgatgccccctcccctgggcgtggcactcctccttggtgctcctctggttgtcaacaatgcctgacttcttgagcactcgctgtcttccaggcccagggctcagcgctctgtaggtatcccctaattcagtccttggagcagccccagtaggagggctgacccttgttccatttgacagatgacgctcttgaggtggcgagtggctcaggagctggtcccaggtgaacagcagtaggtgctgagcccccactggattcctgggctctggacttggtctggttttgttgtttttgttgttgttgttttccagtagctttatcaagataaaagtcacataccacacaattcacccatttaaagtgtacaattcagtggttcgtagtatattcagatatgtgcgaccacagcccgttttcgaacatctccatcaccttcaaaagaaaccctgtacccttttagccatcactgccctgccccccagacccactccacccccagccctgggcaacccagtaatctcctttcccgcaccatacatttccctactctgactcacatataaacagaagcggagggcagtgagctccggcgcctggcttccttcgcagagcatgatgtctctaaggctcacccgtgctgcagcatgggtcagtgctgcgttctttctcatggcgggacaatactccatgtctggatggggcacattttgttcatatagcatccaccaagggacacatgggctgtttccacctttggctgtgatgagtggtgctgctgtgcacatttatggagaagattttgtgtggacacaggttattatttctcatgggtgtacacctgacagcagacttgctgggtcaaatggcaactctgtctaatggtttcaggaagcaccagactgttttccaaggcggctgcacccccattcccagcggcggtgcgggagaggcctgactgctccacgccttctatggcactgtggttgcctggctctggttcacccatcctggtggaggtgaagtagcatcttgctgcggttctcacgtgcgttctcccgatctacccccaaccggccatgctgccggcgctcactgctccctgtgcagacagcccagcttcgccccaccagcctgggacagctgtttggaatggcccttctgtgcagtcctctttgcttgcaacgtccataagccatgagaaccctccagaactccaagcccttgacctccatatttcaggagtttctcacattttggagcctggggccagacagcaggccagggctgaagctggaagtctcttccctcaagcacagcacaacacaacatgcaatcagggaccaggcaagtcaggggccaccagagagggtcaggacccaaactttgggcaagctatggacccagaacacggccacgggcagaggcaggatggactcaggagttagggagccaggagatggggccagatggagaccagaccttcaggacatgaggaccagcaggtcagatgggcccagcatgcacggttgctttcaactctgatctgcaggctgggtgggggtaggcagctggcagacactcctggcacccaggaaacattcactgaaatgctgcatctgtgggagaagaacagccgccacctgtgggctcaggttcagtgtacagcagagatttcaaaccacagtggacttttcaagagacctgcctgactgcaccctagagaggcgggtttcctctgtctagggtggtgctgagcatgagtttctgccgtgcatgtgtccagggttgcaggcccaatgcacaagccatgtctgcctcactcagagtgggctgagaggagcaggggaggagaaaatgtggaaggtggtggggtgaggctaccgtgggcttcttaggtggttgaaggaaacaggtaaaatgtctgcagggcccagagtcctgtgtaaattacagtgacagcggaatgatctgtggatttcttgtccaactggctcgtccaacaatctgttcacttgtccttcagggcatgtcccctcaaggctggctgctgaaggtttatttttcctccagagctcaaactcccagcgacgcctccccgacctggccccacaactctactctccaaccttttgcgctggcgagaaacaggggactaagtagacttcagttgcaaatatctaatttgggatttaaaaatgtaaagacaaaaacaatgcagtggaaatacatgacttgaagaccaaggaacaaagtgagtcaagtttttaaggctctatccagcctgcctcagctataatatatttaacttttaaatttcagaagacacacatttttctagttgacataaatcttgggcggtcctaaattttagagccaaatttgattcaggtaaggtttggcttcagaattaatcaaggagttttctccctctttagatgaagcaaaataagttctatggagaaataaaatagccaagacccgagatgagagaggactgcaaagccaaggtttcctgcccttcaccaacaccgggccagctgtcctgtggggtggggggcaggcaggcacatcccatataaaaccctctcatttccaattatctaacataactggtgaactttctctactgctaatgtggttggttgctagctactcaatgccccccagtccagcatgttttccctctttattgatgacagccaagtaactgaccttttcactttggctgttaggaagctcagaactaaacatgaatccacctaaagcaccatgttggccttcagtgaccgtacactcacagccactgccacacaagtgcactcacaggtacacgcgaacgtgcactcactgccaccgccacacacgttcactcacaggtacgcatgaacacgcactcacagcctctcctgcacaactgctcttccaagtcttgaccaactatgccaatatggtttcccttggtccagaccttctgcattttatttcaactctttattgtatatccagagagagtttggaaaagaagcgagaagcgtggataatggccaggaaatgggggtgacggtgctgtgacagagtgtctagtcaaagaggcagtgcacagcctgggaggtatgtgtcaaatcacacagtccccacccctccccacccctgctcctttccaccaccccttccccgcttccagaccctgactgctgggaaggggccttctctcagggtgctggagcccaaggaaagctcagacagggagacagaggctgggtgacagagacggaagaaggacttgctccgtctccgtgtcccagagcactgctctcctaggagccgaggcaggcccagctctgcacactccagctggctacactcccgctgaccccatggacacagaacacaggctctttccccccatcagcgactgtcagggcacgcacttcatgaagctggagcttcgctctcaatccaccaaatggcatgcgtttttaacagttactgagggagctaattagttcataaaccaggacgcctcttccctggcatcctgggagggcggtggtgctggccccgcatgtgtaattaccctcaagtcgagaacagctcctgaggagctgttgggctctcttgggtaaataatttacttttacaacttttcattaaagattaaagggaattaaattaaaattagggcaaaatgaagttggagaggagacctgtacagcttggagttctctcatcggaggctctctgcttcctgagctcacccaccctccatccagggatgccagggcccctgtggaggggagaccccggggatgtgcaggaggtgagctccggagaggagaaggacttcccttccaggtaggcctcctgattacaccctgcatggccaggacctgctggggatggtggccgtggctgccttgaggacggggtgaaacaccgtcaccaacacaacacactgaggccagggtctcccagcccatggacaccctccacggataccaggccaggatcctcgggtcgaaggctttatggcttggatgtgagatgatggttggagcttaggtgctgactcaggggcctgggtgagccccttcggaagccagagcttctgcttccttgtctaaaaaagggaaaggtggtgcgtggagtgaaggagagggctgagctctgatcctggccagagagaaatgcccaatgaacagaggggtgtgaatcactggtgcctggctcccacacccaggagagctgagaaaggagttgtgggttaatccaggccatgcacttgcagcggctccagctcagctccgccttcagcacgctcaaagcgattggtaggacagcgggtgagtcggggtgggctgtgcacagagagctgagcctgaacacaggccaggtcgtcctagcaggggcaggacatgggctgctgaaggaaaccagtcctccttcaggcccagcaggctctgggatttgctgccctggctggagcctcccttggggacaaacagagcaggacagggaggcaaaggggaagccagggcctctggatggagcgggcagttgggggaccagggactgggctcgccgccttgctactatgtgccttttggccaagacttcacctctctgagctcaaatgtacaaatctatagcacatgggtaaactgagtcggtgggcagcagcccgcctccacgtgcccatggcgagcacgctggcactgcttcactgaacattctcagtgacattccgagaggcatcgtcctgctcacttgatggacaagcctgttttggtttaaagagacagagtcagcacttcaacccaggtctccctggcaccaaggccagtgtgcaccttcactccacggctctgtgatcagggtggcatctgctgccatccacagtgccccttgccctctgtgctgggctcctgcaatcgccgccggtggcacctcagctctgtgtctcaaggccctgcacatctgccccctccgtgaggcagttccctgctctctcatggaatactcgacctcgagaaggttctggttgcagaggctgtctgggaagccatcgcgtttcctcctgggcacagactgcagcccctctccaagggagtgagttggaaacacaagatcaagtccagaccaaggggacttagagggaaaggacaaacctggaccgtaaacacatccatcctatagtcccccatctccaggctgagaggagaaactgaagaaactgagggctggaggagggaggagctgcaagataggcgggctatgggaccaacaggtccacggggtaggggagcccctaggggtggggccccaggtgggtagagcctcagggtaggcagggacatacaggggacgaagacacgaggtggtcagagccagaacactgtggagcctgggtccccaggtgagcgccaaaaagctgcctgcaccaagaacaccatgagatataaacataatgaggctgatgtgttaggtccctggaatttggggctgtttgttacagcatttagctgtgacatttacaggccaccagagctcatttaaccaagccctccctttcaggaggaagcaccagggcccccatgcgctgctgtgcccacggccacattgggcatccatggcagacaggcactgggcctctagtcccttctctctcaacacaggcaagctgtgttttgcaccaggaacgccttggctcatggagacaatgactatattaagtgcttccccttcaaccttctctttttggacaagcactttagacaactgaagataaaccagaagaaaaagaaacggggaaaaaaatggaaaatatgcctgctggctggaagcattatgcaaagacagctttctgagaagagcagagaatttaaaatgactcctctgtccccaagcaatgtctctaccttttcaatctctcatttttcatcttctctcaagcctgtctaaataaagcaaagactctcgccacccaggcaggccccccgcccccaccgctctgtgtggctctgtgttgagtccttgtcctcatcacacaatgccaacccagtctcagactttctcatctgccaatcagatcatacacgtgggcacggtcagcacccagggggtttggaggaatcatgagaccctttcctagaggaggaagctgaggcctggaagggaaggagtacaggagggtcagagcagatgtgagggttgtgcaggtgtcagagtgggtgtggaggtgtccaggggtcagagcaggtgtgggggctgtgcaggggtcagagcaggtgggaggtgtgcaggatcagagaagatgcagggggtacacacagcaggagtcagagcaggtagggggggcgtacaggggtcagagtgggtgtgggggtgtcccggggtcagagcaggtggggaggtgtgcagggatcagagaagatgcagggggtatacacagcaggtgtcacagcaggttgggggggcatacaggggtcagagtgggtgtggggggtgtcccggggtcagagcaggtgggaggtgtgcagggatcagagaagatgcagggggtatacacagcaggtgtcagagcaggtaggggggcgtacaggggtcagagtgggtgtgggggtgtcccggggtcagagcaggtggggaggtgtgcagggatcagagaagatgcaggggttacacacagcaggtgtcagagcaggtagggggggcatacaggggtcagagtgggtgtgagggtgtcccggggtcagagcaggtgggaggtgtgcagggatcagagaagatgcagggggtatacacagcaagtgtcacagcaggttgggggggcgtacaggggtcagagtgggtgtgggggtgtcccggggtcagagcaggtggggaggtgtgcagggatcagagaagatgcagggggtatacacagcaggtgtcacagcaggttgggggggcgtacaggggtcagagtgggtgtgggggtgtcccggggtcagagcaggtgggaggtgtacagggatcagagaagatgcagggggtatacacagcaggtgtcagagcaggtagggggggcatacaggggtcagagtgggtgtgagggtgtcctggggtcagagcaggtgggaggtgtgcagggatcagagaagatgcagggggtacacacagcaggagtcagagcaggtaggggggcgtacaggggtcagagcaggtgtgggggctgtgcaggggtcagagcaggtggggaggtgtgcagggatcagagaagatgcagggggtacacacagcaggtgtcagagcaggtagggggggcatacaggggtcagagtgggtgtgagggtgtgcaggggtcagagcgggtgtgtggagatttgcaggtgtcagagctggcatggggggcatgcaggagtactgaggggctgcagctggttttctgtgccgggccttgcataggctgcttgttggctctgcctgggcatctgccattggcgtgtctagcgcagcctctcctccctggaagccttccctcccagggacctctgttgctgccctcggcattctgcaccttgtgcccatgtgtgccacctagaagggcatttaccttgggggcagggggccgcctccactaacaggctggcacttcctccccccaggccctagtgcccagcagggcctgtgtgtatggggcctgtatggggtctccaccaggatttctagaccttgaactctggcagtaggtccaggcttgaaaaccaggtttctggactcctggtgtgtgcagcagggagacagcaggaggaagacattttccagagagaagacataaagtgattgtggatgtagaaatgacgacttcaattgctcctccaaagtattcaaggccaagttcaaggctgtctgatcacgtcccctgtggtctctcaccccagtgccctgcgacttcccctgctccatctgtccctccctcctgctgactccctgtggcctttccaaagctgggctcctgcagcacctgctccaggaagacttcctgaagcacatccagcccccagcaacccgccatggcctgcatggcccacacgggaatctgctgctgagggactgtctctcctgagctcctgggggacctctgccatatgaatggacagacgataagatggccttggcccttcaatggcttacagtgtgacctcaggtaaatcatttaaccgatctgagcctcagcgtccccattgtcacatgagagcaatgggctgaatggtttcaaacaggctcactatttcatgttctcatctctgggcgccatgtccagaacttcttcctaccatgaaaaggtgccatgcttgtcatgaagcatgccgggaacccctctcaccctgtacccccagactgtcctcacacagcccagggctgacccctgcctggtgctgggtcagtgcttacgaggttaaacagactcttgatgtggtgacagccaaagcttcacatagaactataaagtcttagagcacaaacgggaaggacatgaggtgcaaaaggaccttctagtggcccatctgcttgaaccgccagagccgggcagctggatgagcgggtggcggttagctgctgcccctgtgctggactggaggggcagggctgcccagtggagagcacctccctgctgagactctgggcaaggagcttttagaagcggggccacaggcagcctggaggttcctgaggacctggtcaagggagatgggcccagacactccctctgtcctaggcttgggctggcaacacagagacgaccaggagctcacagcctgcaggggagactgtggcccacacaatccaagaccgggtgaggagtgtcccccaccccatcccatctcagctgggagtggtgggggctggatacaggagggtccacaggagccctggctgtcccagtgtggcatagacctcacctcagtcctgaagcatccaccaggggttgcccaacctcccctgctccccaggcttctctgatggggcttgagcaccccaaaagctgcaagtattaatttaatccggggtcccagatgtgcacaggattcctgctctccattatggcagccaccctgagaatgaatactggtttaccagaccctggaggcaaaccacgcctccccaggcctcagcaggctcaggtctaccgtgcctttttgtcctcttccaccctagccacctccagcagacaagaggcgccctcaggctgccgcccctttgtatttattgctgggtctcctcagtgtgcagaggagcaccttagggccaggcagcacccctgcattgcaccccagcatgaaaagacccatggagctgtgctgggcacaggctgaggggctctccaggcagcctgaactagagaagagaggacttgctgggacccccaaagctggcttgtggcccctgctcctggggatagacctctggcctctctccaaagaccatgcggcttctctaaatgagctttccagcacggagggggcaggaacaccctgggcctgcctgggatgagtcccgtgggaccattcaaactgcacctgttcaacaggtcccagcctatgctgggattctacctgcagagctcactaacactctcaactgcttccatctccaggagtccatttgtttcctggagcagcagcaggtgacatcagcaggtgggtcttcaccctgctgagcacagggaaaccaagtgtgactccagcactagagccaagagcctccaccctctgccaggcagtgtgatggagtctctggcccaccccaagggctgcagacagccaagcacaaggggaggagacttcctcatgggctgtgccagggcaagccagcagggctatggggtcatcctagggaatggctggctggccaatcaatacgccatttaaaattagcacagccctgcctgggagaaaggttatgggaggtcaacatagtcagcccacccagccacaggtctgaaacctctggcccaactctgtcaggtgttagtctggaaatcacagtggatttcttggctgtgcaatgatcagcagccagaactagacagaatgcatcttttcaggggtccagaggctggggatgcccaggggccaggcccacagcacctgggattgacccccgccatggcatataagtaagcctggccctttcagacaccagatcacccctgcatatccctgctgctggtcccagggccatgccctagccttgctcatttctgattcttcccactgccctcttgcttccaatactagcttgtggccactagcaacagggtgggactcccctgtttcacttctaaagtcattgacctcagcttggtgaggttcttagttagggtgacggatatagctctatctgcctaggtatctggactcccatgccccaaccctagaacaaagacctggacacaacctcttctgcctccacaaactcaaaaactctagactacatgtcatccacctatccatccagcatctacccatctaccatccatccatccagcatccatccatccatccatccatcctccagcagacaagagatgccctcaggctgctgcccctttgattttattggctgggtctcccatccaccattcatttatcatccacctatctatccactattcatccatccactcaccatctacccatccatccatccatccatcaatccaccatccatccaccatccatctatccaccatctacccaccatccatccagcatccacccatccaccattcacacatccatctttgtccgtctaccatccatctatccatccatccaaaatccaccactcatccattcacccatccatctctctaccatccatccatccatccaccattcatccactctacatccatccactaccacctgttcatctaccatccatccatctatatatcgatccatctatataccatccatccactaccatctatccgccatccatccaccatctacccatctaccatccatccatccatccaacatctacccatccatccatccacccatctaccatccatccatccaacatctacccatccatcaacccatctaccatccatccatccacccatctaccacccatccattcatccaacatctacccatccatccacccatctaccatccatccaccatccacaattgaaccatccacccatctaccgtccatccatccatccatctaacatctacccatccatccatccacccatctaccatccatctatccaacatctacccatgtatccacccatctaccatccatccaacatctacccatccatccatccatccaccatccatctatccaccatgtacccaccatcaatccagcatccacccatccaccattcacacatccatctactgtccatctaccatccatctatccatccatccaaaatccaccattcctccattcactcatccatctctctaccatccatccatctaccattcatccattcatacatccatccactaccacctgttcatctaccatccatccatctatatatccatccatccatctatctatataccatccatccactaccatctatccaccatccatccaccatctacccatctaccatccatccatccatccacccatccaacatctacccatccaaccatccatccatccacccatctagcatccatccatccagcatctacccatgcatccacccatctaccatccatccatcaatccaaaatctacccatccatccatccatccaacttctacccatccatccacccatctaccatccatccatccaacatctatctacccatccatccacccacccacccatctatccatccatccatccatccaacatctacccatccattcacccatctaccatccatccatcatccaccatccaccatccacccatccaccatccatccatccatccaacatctacccatgcatccattcacccatctaccatccatccatccaacatctacccatccatccattcacccatctaccatccatccatccaacatctacccatccatccacccatctaccgtccatccatccatccaccatccacccatccacccatctaccatccatccatccattcatccatcaacaactacccatccatccatccacccatctatccatccctcatctttccatctatccccctttccttcctccctccctttattcacttcccatcagatttcccaatagccgttcatgcgttttaccgttttactgatttgttctgctcttccctcaggggaaatactcccagtggctgctgaatgctcatctatccttcaaggtctggatgcagtaagtcattgctgcaagccttctgtactccttccagatttctctatgctcccctgaggccttgatcatactctccttgtttgcctgagtcagatgagtcccattaagccttatgtctgccattactagctgtggccctctggccagccacccattctacaagtcccggaatcctcatttgtaacatggactaagggtgaccgcgaggatgaaaggacttctatgagtagcgctgccacctcaacacatgatgctgctgggcaatgccacccccctctcctcgcctgtgttgtggccatgggacagcgaggtgtctgcatgtctgtctcctcagctgaagcacccccatcatggttgtttgtgcatcccaatcctgctccttggcacagagcaggtattccataaatatttgctgaatcaaactgacttcatcttggcacgtctcaatcttgaacggacaagtgcaaaaagagagaccatccagtgtgttcttagctcaggctggctctgcagggaaaggtgaagccatgtggcagccaccattagattgaaacagccaaggcccccccagcctgctgctgctccatgctctgctcctgacctcccaaggagcctggccctctccagaccctgctttccttccctgggaaataagggcatctaatgagtgacccccaaagctctttcccctttgactgcctggtctcagctgcacaattaacagcagacatcaccaagaactagtcagtttgtatcacctggggctcccacatctgctcccaggagtgcagctggtctgaaaaggtgcccctcagcaatcaaggccagagccacagtccacaggcactctgggtgctgcttgcagacagctgggtgctgccttccaagactgcctccattcaggggtgctgccgtgaccgagatcacagacccttcctggggtgacctacatgcggtgactgatccacacagggtatcaaggctgggcccctcacctcacccaaactcggggtaacaacaagaagccatcccaactcccatgggtcggctgaaatcctcactgggcctgcccagcttctttctctgtccatctgcttcctcctctccttcccaccgtgctgacctgaaggtgctgcgtgccagcctctgttttccagagacgcccccaccccgtgtcacaagctgaacagcacatcttcctcccctggctgaaaacaggtctcctgctggtgcaaaaccacattcaactcatcagagacttagccttggccccaccacttactgagtgactttctgagcttccacttcctcatctgtcaaacgggcaaaacgtactaggaacacagggtgtggctaccagggaaaccccaggagctgtgcggcacacggagctgtcactgccaggggccctgggaaggacgggccaaagccatcggtcttggctgcctggggccaacaggacaggggtgatgagatggccctcggccagccttgaggtcacctgagaggtcgttgtaattgggggagccatgagctccgagcctcgtctgccccagctcccactgctggctcagtgctggtgtggcacctggcaccctccaggtcctcggataacttgtgctgagtgaatcagtgaacctaggagcatgcaggacagacctgtggagaagccagccagggtttggggatgaggacagcgtgtcgcaggaggagccagggattggggatgaggacagcaggtcgcaggaagagccaggatttggggtataaggacagcaggtcgcaggaggagccagggttggggatgaggacagcaggtcgcaggaagagccagggtttggggatgagaacagcatgtcgcaggaggagccagggtttcgggatgaggacagcaggtcccaggaggagccagggttggggtataaggacagcaggtcgcaggaggagccagggtttggggatgaggacagcaggtcgcaggaggagccagggatggggtataaggacagcaggtcgcaggaggagccagggttggggtataaggacagcaggtcgcaggaggagccagggttggggtataaggacagcaggtcgcaggaggagctagggtttggggatgatgacagcatgtcgcaggaggagccagggtttggggatgaggacagcaggtcgcagggggagccagggtttggggatgaggacagcaggtcgcaggaggagccagggttggggtataaggacagcaggtcgcaggaggagccagggtttggggatgaggacagcaggtcgcaggaagagccagggtttggggatgaggacagtgtgtcgcaggaggagccagggtttggggatgaggaccgcaggtcgcaggaggagccagggtttggggatgaggaccgcaggtcgcaggaggagccagggtttggggatgaggacagcaggtcacaggaggagccagggattagggatgaggacagcaggtcgcaggaggagccagggtttggggatgaggacagcaggtcacaggaggagccagggattagggatgaggacagcaggtcacaggaggagccagggtttggggatgaggacagcaggtcgcaggaggagccagggattagggatgaggacagcaggtcacaggaggagccagggtttggggatgaggacagcaggtcgcagtaggagccagggtttggggatgaggacagcaggtggcaggaggagccagggattggggatgaggacagcatgtcgcaggaggagccagggtgggggtagagggacagcaggtcgcaggaggagccagggttggggtataaggacagcagatcacaggaggagccagggtttggggatgaggacagcaggtcgcagaaggagccagggtttggggatgaggacagcaggtcacaggaggagccagggtttggggatgaggacagcaggtcgcaggaggagccagggtttggggatgaggacagcaggtcgcaggaggagcccgggatggggtataaggacagcgtgtcgcaggagaagccagggtttggggatgaggacagcaggtcgcaggaggagccagggattggggatgaggacagtgtgtcgcaggaggagccaggctttggggatgaggacagcaggtcgcaggaggagccagggttggggtataaggacagcaggtcgcaggaggagccagggtttggggatgaggacagcatgtcgcaggaggagccagggattggggatgaggacagcatgtcgcaggaggagccagggattggggatgaggacagcaggtcgcaggaggagccagggtttggggatgaggacagcaggtcgcaggaggagccagggttggggtataaggacagcaggtcgcaggagaagccagggtttggggatgaggacagcatgtcgcaggaggagccagggtttggggatgaggacagcaggtcgcaggaggagccagggtttggggatgaggacagcaggtcacaggaggagccagggtttggggatgaggacagcatgtcgcaggaggagccagggtttgaggatgaggacagcaggtcgcaggaggagccagggtttagggatgaggacagcagggtgcaggaggagccagggttggggatgaggacagcatgtcgcaggaggagccagggatggggtataaggacagcaggttgcaggaggagccagggtttggggatgaggacagcaggtcgcaggaggagccagggattggggatgaggacagcaggtcgcaggaggagccagcgttgggggatgaggacagcaggtcgcaggaggagccagggtttggggatgaggacagcaggtcgcaggaggagccagggtttggggatgaggacagcaggtcgcaggaggagccagggtttggggatgaggacagcagatcacaggaggagccagggtttgggtatggggacagcgtgtcgccggaggagccagggggcgtgggtattaggatggcatgtcgcaggggccctggaagtgggctgtgcagtgggcccagtggctgctctggcagtgcctgtcagtgccatctagagggagtccccccagcccaggcatcattcacttctgacgccactggccaggcctgtctcattcttgaggcctggtctcttggggcctggtgggctgagtgcagagaggaccttctacatcacctgcactgcccacagttctcacgcttagtaggcaagcagtcggcactgctggcgggctcgcctccctgtccaagggggaatccctgaacccacggcaaggacgctttctgctgggcttcctccagggagtcacatgccaggaggctgcatgccctgatgccaggaggatttttccagtgattaaaaatgtgtccctgccgagtggcctcattttttattttaaacaaccatggccccagggattgggcctgggcctcgtggaggccttctttagagaagaaagcaattagaagatgaattaaaaacaaattaatctttgtcttcttccacttggaagggaatcccgtgacagcggggaggccaagcgctcgggcctgggaagccagtgtcacccctcagggccgggatggctggaggtgcccatcgctggacttgctggctggggctggagcaaatgccaggcttatgtggggtggggacatgtgcctgtggaggagaccgccctgtgtggaatgggactcacactgagcatgcccacgtcgcgtgctttacatttcttacttggtgatgaaggctttatcctgtctatcttgcaaaggaaagaaactaaagctgaacttggctcacatattgactctgtcaacatcctagctctcatactagttagaccaggaatacccctggctagaaggtgaggccaatgcagaaatgaggcctggtgcccttctgcctgctgtggggaggccgggggcaggggatggggatgcagacacagggaggcaaacggggtacgagggaagcacctcgtgggttcagctgataaaatgtttactgagccaggctccctgaaggaggggttgccccagggcaggaggacctgtgccacgaaggcaggggcaagaaaaccttgtgtcagaaggtgaaggcggttggggcaggctgaggaagctttcctagcttcagtgtgtggaggtagtggcagagaaaaggctggacaggtagcgaaaccgggttatgctacaaatcagccaagtaagttatgggaatcgctccaagtcccaggtggtgaggctgaggcgggtttctgacgccaaagcctgtgttgcctccccatcctccagcggaccctagccaagcacctgtggagccaggtggagactgtggaagggcaggggcagccctggcctccctggcactgaacccaagacactgcatgagtgagaggtgcctctgttctctttctggtccgcctcagcatgcgcagtggtagaggtgttgatggcaactggtgagtgggccgggtgctgcttcagctccacccacagccctctgagttagaagctatgactgtccccatttcacagatgaggaaaccgagggtcagagaagttagcaacttgcccaggctgcatagggaatggcagagctggagtctgaacctagcaggggtgcttctgaactcagtcccctgggaaagggaaggcaaagccggaaggggcggggaggaatacctgccgctcactgagtgtttatcatcttcctggcactgcactaggctctttacatacatggtcccctggaatccttgcctctgccctctgagatgagtactattgccatgaggaaggtgagaggcagaggaggaggcaccttggccaggctgaaaggtcaaggctggtgtcctgggctgtgccacgtgggcggtgctgaaatgccaggactgctgggaattcaaaggcccggaaagatatggagaggacagactcggcttcttgatctagggctacagcggttcctctgcagaggaacgagcctggcgatttttcagacgaggctgagacagatgagcgctgttctaaacaaagccaaggagcattctgaaaggcagcctcctctgggaaacacgaactgcagacacgggggccgggctcccctggggggacacaaactctagatccagctgccacccagtgctcccaggagggctggcacccgctcctgccctcccccagtcagtcctgccaggtgtggaggcaaggtagccctggaggccagatgtggggagggcccagggcagcgcagcctgccggcagccagcaccatcactgtctccaagacagactcccagaccagtgcccacccagctgtccatgaagccgtccctgggggctggatggactcaactcccagccctgtctctccaagcccaggcccctgcaccagcacacgcccgtcatgtctgaccccccgtgctcatctcagcatgaagcatgcacatgcatgtgtgcgtttgtgcacagtgtgctgtgtgttgtgagtgtgtgagtgtatgtgggtgtggagcgtagtgtatatgacctactccagtggcttgggggctgcagcgaggccaggtctgtgtggctctgtgagtaggggaaggagggtggacgtggacccttcgctctccatccttggaataccagattcagacagcaaagaacagggaaggaaagcaatgggggctttccccccattgctgaaggaaagcagacagacagcttggagagggcccaccctggggagtgggaactggggccaagatgcgctctgcttggcccctccctcccagggtggcctgtctcaggcggacagaaagtgaccgcacgctcagaacatcatccaaagggcatccagcaacttggcaaagtagcgaaggttctctccttgaccaaactctcagactccctgagctctttctcaatgaggccttaacttgtacatttcctcattcatttctgcactgtccttttgtgagaatcctacgaagtcggtttatccagactccacgtctgatcaccctccgtatctgacagggctcctcgccttccaccagccctcaggtgacatctgatcaccccagcctgtctcagaagtgtaaggcaaggaggagcaagtcacttcttacgtggatggcgacaggcaaaaagagagcacttgtacagagaaacccccatttttaaaaccattagatcttgtgagacccactcactatgatgagaacagcacgggaaagaccttaccccataagtcaaccatctcccaccaggcccctcccacaacacatgggaattaccggagctacaaaatgagatttgggtggggacacagagccaaaccatatcagatggggtgggtagcttgggtctttctgccttggtgaatctcctacagtctctgcacttcctgacttggttgcttagcctcttgcaatccaccaaggtgcagtacaggcctccctgggccaacagcactgcttccaaggtaagaacagggtttttgaaggcaacttggaaatgaatgcctttctgttgtctacttacttcacagggaggcaatgtcaggtccctgaaccacgtcctgggcaggggatgaggtgcctgtgctgggggacctgttggtaaaggctgggggagaaacagagaccaactgggcccagacacaccatttatagggtgcagggcaagagcacaggtgtggacccacctgccacattagatcgacgtctgaatcttcagaagttaccaatcaagctcacagccggacatgaagcttgtttaatcctcctggcaaatttacctttgtagcgaccaagaaggccgagttaaaatgtagacttcccgggccccttagagttctgggcgggaaagtgatgatgcggtgtgcgccagttccctgctcccagccctggtgctggcttgcccacctcctcctcccaaccccacaccctgcctggtactatgaccccgcattctgaccacagacctgggacccaacccctcagcacagctccgccaggtgtcatgctcgtggcgtgctgtcaacacagcaaacttgatgaccttgccccatcctccacttcctggctccaggtgctgggtcacccccctcagggacggcccactggacagtggcccaagccctgaacccaggcccgccccgttctgctgtcctgtcacggggcaggaccactctctaggcctgacgccacaccctgcgtatttctcaactccaagccctcccacaccacgcctggctgcctgcacgtgtgcatctgcttcttctgcttgtctcccctgactcccccttgtttatgctctggtgctcagttcagaagaagattcttgacagagagaaacagattgtttcttttacacttgtacaggcaaagccgtgcctggatctataggtgtccctctataacccggccctgtctgggctcccaggcccaaggatgctctgctccttcctgggacccaggacagccctctgagccacccagccctgcagcccgagtgagggcctgccacatgctcattggaggagtgggagaaggccagctttcagcagcctgcatttgggctgaggaagacccctggagtacctctaacgcaagcagagcggcccactgcaaaagtgtcctgaagtgctgcttctgagaacccaaagaatgatgtgtaattagcatattaagaactagtatgcaaatcacggtgctttaaaacagtctgttctcttaaatacagtcacgcacagcttaacactgcggataggttctgagaaatgcgtcattaggcgatttgtcctagtgtgaacatcacagagggcactcacacgagcctggaggtcaagcctctacacaccgaggccgtgtggtggagcccattgcttctaggctataaacctgtacagcgtgtgactgtactgaacgctgtagacaacggcaacacaatggtaagtatttgtgtattacccaaacatctagacacagaaaaggtatggtaaaaataaggaattataatctcacgggatcaccgtcacacatgcggtccaccactgactgaaatggcatgtggtgcacgactgtaatttaatcctctccactgccctcttctcccctagagtatacatgtgcccaggaaacagatggccaaggtgcggagggcacctgggaagggagagccccaagcagctgtctcaggtctcagctgcgggaccttcagcctctcattctgcctctgagttgcccaccacgcacccagaaaggaacatgaggaccaagttcccagtctcagttgcctggtgatgggaggtggagcagcgcagtccagggcagccactgcacatgccctgcaccgggtctgagaatgaggctgcagctgcagccggggcagggccagtgctcaccctggcttcctggaagtggggtacgggtctctgctatggactggctgaagccttcttcattctgtgattgaacaggaataattcccccagagggccttaatttagcactaaccaggtgctagatacagcaataggcattttccaagcgactcatttttgtcttcctaataactctggaagccaggctttatagaggaaaaagaacaaggcgctgagagggtaagccatttggttaaaaccacagaggagtgtggggattaaaacgtggctctggcgaatataaagctcatgatctttcactatgactacaggaaggcctcgcctttggaatgaatgaaaaagacccatggatttatctagaaaactaattccttattgagtcatggggaactttgaaaatctgatggaagctacagcccctctcccgtggggacatgttagtcccctccctccctccctccttcactcatagcaaatattcactgagcagtcaccacgtgctaggcactgtgccaggttctacaaacaaaacaacgcccatggcttccagtctcttccttctggtagaagaaaccagaaaacaaacaagcacacatgcacataaacacacacacacacacacacgtgcacacatgtgcacacaggcacatgcacacacatgcacgcacgcgtgcacacacacgtcgatcattcaggtgctggtaagcggggacaggataaagggagctggaggctgccacgtgggtcaggggagacgaggagtggctcagaccaggtcgaagctgtacaagctaagaagtggtcaggtcaggccatgttccagcaggccagtgatggagcaggcatagtgtggaaggggtcaggtgttgggcctcagcagccagaagaactgcccgttgacaactggggacaccgaggaggactaggactcgggaggttagcagtatcgagcatttgatcttggccttgtgaaggtggaagtgctcattagatacacggtaggtctgccgatggggggttgtgaccccagggagaacggtgtctcagaagccaagtgaagaagggccttgggaggagggagctatcagtgatggcaagtacggtgagggcacaggtgtggggactgtgttggcatggaggccacagtgacacatccactgtctggatggagtggtgggagctgcagcctggggtgggtgtgctcgagagagctaggggagaaggagaggaggaatgagcagaggtggcaccttggagtccgtgtggctgtagcaggggcagtgaaatggggtggctgcaggaggacgtggatcacaggagatggtggcattttgtgataggagatgccacaacatctttgctgaagaacctgaagcagtccagaaagaaagaccagggagcagggcagggctgcaaagctgtgtcccagagggatcacctatgaagccatggaaaggccatcaaccatcatccaggacatgcttaaaatgcaggcacaataattcattcccctctagtgccggcagaatggctttcccagcactgagtgagacacgggttcagctgaggtggttctgccccctgtggcctgtcttactgtggcctcagttcacttttcagagcatgcctgtgttcacaaggacacaccaggctccacacttaatgaccggaaaccccaagttggaggcgtccctgtcctggtgtgtacgtagggcatgtgtaggaagacagctggatctggatcagtgaggcgaccggctagaggaggtgacccctacccctgagctgcccactccccaccacggtccggtgcatccagtctgcagatgtgttggggaaagaagcatacaaggagtgaagaagacactgaaacgtggcagcaagtactcggttctcgtcccagaaccgcactcctgtctctctgcaatacttatctagacactctgccttctctcctaccatcgtctccatcatcccagggcacagtaggtcttcaggccacataagacaattcattctaaaggagacactccgtcaccttcttgccagtctctccaagccaacgcttgggttcctgcatgaggatccactgaacacctgctcaggctggaacgagcacccacagatgcacccaagggtggggctgctgcctggtccccccaaacacactctctccagttggttcgtttgttctccatcccatcgctcagaggcggacctcaccacaggacctgggtaactgcccaagttctggtaggagaagggaggaaaagccaggctgaggtcaagaagaccccactgaatgggattcctaaagctcccccagctacagggtcactgacgccctcgagggacagcactattgtgtggacatgtgtgggtttgcgttttcctagacaaatagtccaaagctttcatccaatcatcaaaatgctctgaggctccagaaggttagtagccaatatcttaaaggacagggtggccgtgggtgggaggagagatgagggcaagaggattagagttaagggaagaacagtttagaaataggcaaggaagggagggcttttcttggtttcaggtcagaacccccatcaaggggctgggcaggtgaagtggtggcaggctccagaggcccttgatgaaggacaggggctgggattcccagaaggctgccagaggaccctgtgtggggtacggaggtgagggtctgggggcagaggcaggaacaaccataggagtggacacacagatgtgtgctcttgaaatgccaagcctgtgccagtctgcctccgaggtataacccaggagagctctttcccacaactgaatttggatcacccagcctggcacagggcacacttcatccccagccggggtctgtgccagggcggtgagctggtggcacacgtaggtaggcttctcccccatctgacctcacgctgctggggctgccttgaagggcgcaggtgtggccctgaagctttatctctcaaagggctaccagcacaaacatcatcactgtgtaatttccatagatgcaacagctaaagtgcaaagtaatccaacagtgaaatgttttgctttctttattccaaggcctcagggaacctgtcaaatccccttggccccaaacactagggcgcagagatggaaagaaagaggagttctgacagcctcaggctccctcaccagctctgccagccctgacgggatgcgtgtccttgggcgtgtctgccacctgctcaggctcagcccatctgtaaaaggagggggcaggccagggagtgtctctgctcccgtactggggtctggccatccacagttggctccacacccctgtggcccctcatgctgcagtaatgcccccaggctgggcctggcctccctgtgcccatcatgatcctcctacctcaacagttggcacagtggctgtgctctgggagcctctctccccaggttgcctctaaaatgtcacaactgattccccaaatgcaagttgtggctctgtctaagtccttcaataaatatgtactgacttctgcaccaggggctctggaatcagacctgtgttcagatcaggacctgggagtgcacacgcggccccaggtgctcctcctcattgataacgacctaaccggcatcacgtggggactcagcagcccttccatgcaaggtgctcaacacacagtttctatcattaaggtccccgctcctgaggtcactcactggagggagacaacagatcggtctcaggctcagccctctgcccacaagagctccccgcctggctcctcctaagaacactttcttcaaggcccaagccaacggaatgtcacatcctttgggaatcatccctgttctcctgagggaattgctgtcttgtgcgtcccgcagacctgtggctacagcacttatcatatgctctcttgcgtcctcacctgcatgtctgtgcccaccacatgactgtgagcccctggagtgcggccctggcacagggcccggctggcagttgctggaccatgccccctggactgtgccccctgctatgcctgctgaggacgccaacgaggaccctgatgatgacaaggccacgtgtcagctaccacatggctccaggtgctttacacatcatctgatttagtggagacctggcgaggcaggaattactatttcttatataacaaataaggcatcctctgagaggcgtagggactagcccacatcacacagctagacagggtacagcacagatgtgagccaagtctgtgcgcctccaaagccttgcttttcccactctgcctgtgttttctgaagtgagctaagttcatcaacacgggtagaaaatgcaaactgctaccagagaaggaggatccgtttcttctgacaccaacaggatggctgtcccacagagcatcccatcctcacgagggcagcatcccgtcctcacgagggctccgtcccagacaaagtgggagggagtgaaaggcctccaatgctgggtgagacggatccaggaggaacatgctggcaggtgcatgtgggggtggaagggggagggagagaagattccagatggagggaacagatgaaccaaggtgcagaggtagaggcttgggcttgagctgcaccaagtagcccctctggccaggcccagattctgcacagagaagtggaaataacaagcaggacaagcacttcatcaaagaagaaacgccagccactgatgagcacgtggcaaggcgccaggcctctccagtaatcaaagaatgcaggctgagagactgtagcacaattctttttggcctagtagactggcatagatttttaaggaaaataaaagctattgctggcaagagtcaagggaaatggatattttcatacatggctgattagagtctaaaagctgtaatatttatggagggcaacctcacaagtagcaaacagccttgaaaaatatacagaccctttgactcagggtctattcacattgttaatatgggcagatttataatacaacattattaatatggccagatttataatatgggcagtattgtaacactgagaaactaaaaactccctatagtccaaaaatatggggggatgggctaaatactttctggaacatttgcataaaggaatactatgtagccattaaaaatcataatttacatgtagatttggcatggaacatattaagtaaaagcatagttttacatattaagtaaaagcatagaagaaatacataaaggaggcagtcatttactcagcattgaggatctggtgcctcccaggtgctggaccctggagccacagcagtgaatatgacagctgtgaccctagctcctgcagttccctgggcagtcagggaactgggggcacggggcaggcaggttttgccacccaccagtggtgggccaggccctgcgggccacaccgactgcgctggcctggaagaccctggccatattttcagtgatgtctaattttgaataaaatatgtacctggaaaatcatctagaaagctgcatacctatctgttagtggtcaccatctctggatggtgggatttctggtaatagtccatttcttctttgtgttcacctccaattgttagttttctacaatgagcatgacttccgttttcattttaattcatcaacaggggttatctaaacacagagctcatagctcacttttattctaatctttgtacagctctattaaatgtctactaacatacgtgacacctagtgttaggggctgaatcgtgactccaaaaattcccatgttgaagccctaaagcccagtacaatacctcgggggggaatgtatttagagacagggccttcaaagacatacaaagtaaaatgaggcccaagatgggcccaatcctctcggactggtgtcattataagaggagattaaaacagacacacacagagggaagacacaggaagaaggcagtcgtctacaggccaaggagcgaggcctcagaagaaaccagtgctgccgacatcttgaccttgaatttctatgaatttcgagactccacaactgtcagaaataactttttgttgtctaagccacacagtctgtagtgctttgttagaaaaactactacagtaaccctgttatcctcgggggcaggttccaagacccccagtggacggctgaaacctcagatagtactgaaccctatatacactatgttttttcctcgacatacatacctatgataaagtttaacttatgtattaggcatagtgagagacttacaatattaactaataacacaaaagaacaattgagtaaaataagagtgactgaatgccagcactacaacacagcagctgatctgacggcagacacctcctaggtggctcagggtggggaatgtgcacagcgtggattcactggacaaagggagatgcagggcatgacgggcaagatgtcaccatgctactctgagcactgcacaatttaaaacctacgaattgtttatttctggaattttccatttcacattttcaatctatggttgaacgagggtcactgaaaccaaggaaagcaaaaccgaggataagggaggactgctgcacttccagatacttttagaaagaagcaaatgcaaacacagaatacaaacaaaaataaagtgaagaataaaaataagattgaatagtaatgatccaaaggcttaaaataagcagtaacctagatctcataggtcagagaaaatgagtggaagaactaatattcactaaattttaggtagagcatgaattacttttatactgatttgtacaaattgtttaaaacatgcttaaaaagaagaagaaatacataaaggaagtggtcatttactcagcatctaggatctggtgcctgccgggtgctggaccctggagccacagcagtgaatatgacacttgtgaccctagctcctgcaactccccagggaaggcagggaactgggggcacggggcaggcaggttttgccacccgccagtggtgggccaggccctgtgggccacactgactgcgctggcctggaagaccctggccaccctgggcagacaccagcgaaagcccaatcccgagtgctggtctcccatctgcactgcaggtctcttcaggacccttcatttcctaaggcacccacagcgctgccagcccgttactcctggcagcctggctcagagggcagtggtgacaatggagcccagacgccccggagagaggttctgctgccacctcccgaccttgtatgctgggctgggacctcgacctgaagaagccctggctcccggaagccggtcctcaccgtggctccccgcattttgagactcacatttctttccatgttttgctcctttgcagagcggggaaggctttggtgtctgaggctttagggattcacaatgggagtgtcatcttagtgaagttctccaggcacgggttcacaaaggttccacagggagctgctttggcgagatgggcctgggtccccacggggccccatcattctccagctctgtgacatcgtgaaactgcgcaaacagtgcctcaactgagagctcccagtggacagctcagccagcgtctggtgctctaggagggaggaaaccatggcagatgctcttttcctgaggccacagagctgggggacatcactaatgagaaacagtaagaaattcaatgacttaaaaatggaaaaggagaggcctcacagagatggactgagcccttagcgtggtggggaaaacaagttcaacaacctggaccccagcaggcaggaggaaaattccagaagacagtagtgcaggaaggcagctgaggacagtcccaccaccagagaccttgaacaaaggctggccctgcccgggcctggcgggcgtagggaagagtcaccacgcctctcctgatgcgtctgggcttctgggaccctcccgcaggagtccctggacaagtggagaagagggttgggtagaggaactggtctagaaagtgtacccccagggacgccaacatgctggagacactgaacttgctgtgtggtcagcccttgagcatgcctctgcctgcttgggagctgaaagggggagctcagatcctttgtgcacctgcagggcagggaactcctccttcccagccacctccagtcctggtgctagactggctcccagaaaactctagggccccaaactcatctcttttgaaacttaacgcatcatctatctgccacatttgctccttctgcaaagtcccatctcagagaacggtgccgcccagcactctcagaagaaacctggcatcagtcctggcgcctcctgtcactcatttctagccaatcatgaagccctgcccaggacgccggatcccatgtgtagaaacacagtgtatgccagttgaagccaggggtccatgtgaacccagagtgtctaggcactactcatccatgcctctgaagcctgcaaccctggccagctcttctgaaataggggccttggggtaggttttgaaataaaaaacatgcaggagagaaagctgagctctggccaggtcatggaagcgtaggacagtgcagccaggaggaccactgctgatcatctgaagtgactttcacagaggggagtggcagcagaccccacacgagtggtaggcgctgaggaccacacggatatttgtgacaagtggaagtagaatctgcgcgtcagtgattgaagcctgtgtgtgcagacagcgcagaccccagagccgccaggctgggctgacccaaacctgctcctgcagctctcctggccaggccaggcaccctcggcctttagggtcaggtgtgtctctaggacacaacacaggagcctgactcagtgcccacagccctcctggcttgccgagagagggaacagggagaagtctccgcccagcatggatctgggtggctaggtttgttgagaagggagatatctgagctcacagtgacagcccctttaatggagacttaattatgctgcggcctggtgtggaggatggatggggcactggctaccacatgctgctgagggctatctatctagcccgccaacctctgaggcctacagataacctgcttctcacatcacctgggatccacatggaaggtgatcattaagccaaacggcccacacgtgtgcacatgtgcttacacgcatgaatatgctccaggtgaacccactgatgcacaggtctgtgcctgtggccctacaggcccgtgcagggcagagggagaggcccagactgagtgccccactggtgcctggtgctacaaagaggtcatttcacatcacctcatgggaacccagtgaggggagagtattatcccattttacagatgaggagatgggggctggggcctcatcagggactcatctgacagtccccaaactccttcactctagccatcgccatggccaccatcccagcccacgctcctgggatcctgagaagtcccacactctgcctgtgagctccccaggcgtctgccttcggggtgcacatggccacccccactgccttgcctggagtcggctacacataaaattcccagggccacagctgagcccaggggttatctaaacgcagagctcatagctcacttttattctaatctttgtgcagctctattaaatgtctactaacatatacgacacctagtgttaggggctgaattgtgactccaaaaattcccatgttgaagccctaaagcccagtacaataccttagacatacaaagtaaaatgaggcccaagatgggcccaatcctctcggactggtgtcattataagaggagattaaaacagacacacacagagggaagacacaggaagaaggcagccgtctacaggccaaggagtgaggcctcagaagaaaccaatgctgccgacatttgcaaagtgaatgcaaagtgaatccctgcagagcagcttcatgaagcaggtgaggctggaggctgaggtcactgtgttcctttccagcctaaagccccagtgaggcacccctccaggaggcccacagtttgtgccctgggccacctcgcagtggctgtgggtcccgtggcaggaccacgcctctgaaggagcactggctgcctcgggagtcacgtggctgcacctacccagcaggtagggctgtgtggggttagtcacccagcaggacgcctggcgcgcccaggtctctgcctctgtccctcctcgtgccgatggctctaacaggtttcaacgaaaatccaaagtgaatgctagagagtatttagcaccagtgggatcactaaaatgaacacaaatgaagacaaagttcccaacggctgccagaggccccggctacattcctggagtttgtcctgaaagcctccctgggagcaggcagtgcagcagacggcactgggtgggggaatcagcagcctgaacaggcgactgccccgaagggaaatggaggcgatgatggggtgagtcctccccggtggacggacctcagaggtcgttgggacagctgggtcgctaggctgagctggacagtgacagctgcttcctgctcaccacaccatcactcccatgccccacgccagcctgcaccttccccacagcccccaccctggctcccaggcatctgccacctgcctcaaagtccctcaccacccgctcactccagccggcagcaaaaccacccatcagccacctctgtagtcctctgtgtgtgcggaacctttgcctgaaaccgaccaaccaatcaaccatgcattcattcatccagcgactctcaattcagctcttcctatgtgccaggcacccttctagaaagaaaattaaaatgtctaaaaataaataacataggaagacaaagtgcctgttttcacggcacgcatgttcagtggagaagtcagaaaacatccaaacatcatctcccacgtgggacagcggtcgaccctacgaaggaaagccaggccggctgcgaggggagagaggagcacggtgctgagctggaccaggagcctggggaaggctggagctgcaggctgctgagagcgcagtgggagagagacaagctccccaggccacatggacgcgggcgaaggccactggggcggcaagaaggaggaggccccacgaagctcccacgcctgccctgagtgagacagaagtcggcatgggctgagcagagggtcatagatggatttatggatcacaggccactcgggctgccctgtgagaagagactgtgggtggtgacaccgagtagggacaggtggaaggctctggaaggggctcaggagaaaccggaggatggaggctgggactgggggcgcggtgggctggccagcctcaggaagggctgggtgtgcgtgtgtctgcacgggtgcgtgcaagtgtgtgtctgtgtgtgagtgcatgtgtgcacaccctggggcagctttatctcctcccccaacacaaactcatccccatgaccttcactgtccactcacaagcatcactgcctggagagacccccttcccgctgaccgccagcgacagcagctgtgccgcgtcctccctccctggctcacctgccttagcacagtgcgatgtttcctcggcctccccaggaccagaagcagcacatggccaggagcaggtgctccacaacatttcccggaggaacgagggcttctcctggcaaggctgagctgagtcttattatcattaattattgaaattgtcatttcctgatgaggataggaagacttggcaagggagcagaatctctccagtggacaggtaaggggcagagctaggaaccaaccttgctcttctggcccagccctaatccctgtcgatgtcacacacttttgggagtgcccggagggggacagagaacacacagcatcaacagcaaagtcttcaagtcccaggaacaagaacctgagcagaacgcccggatggtatcatgtcgcctcatgcaatgcttaaccagatagtggggcacaggctgccactaaggggtccaaaggggctctggtccccaagaatgtctaagggccagagtgggcccaggaagcatccttggggctgtccgggtctgtggggcacctagccctgactgggcgggactctggggaaccctgggcctctgcacagactcacatccacccaggggctcacagggccatgtccacaacaggtgggaggacctcagccccttcccgcctgccagtccggaagctctgaggggctgactcccagtcacagggtgagttctctttgcttgcttctctaataaaagcaaactagatgagaatattggtctctggagaccgagccgagccctgattattcattccctttgtgtcttccattcctgtaaacattttccctttgcacaggctgataaatttgcttttcccagaaatgcttaagaaaaggcctttggcctgggctgggcccagagcgtgttgttctcagctagaaatcactgaccgcttttctggggcgctgggaagtcaaggggccgaggccacatctccaggggaagggtgtgggctaactgggggcacggcggcagcccagggctgagtcccgaggacatctgaggccagcctggtttcccccatagatatggcctggcctcaccaggtgtgagcccagagcccaggctgtgagtctggcaggctggggccaccccgacatccccctagctggccacttccctcttttcgtgttgccctacaaggtgaagcccaaattctggagccttcggaggcctgcctggccatggtcaagatgaagtgcttggctctctgtggccatctgtccttcctgcccagtacctgggcctcaaagtgccgtgtgcctggaaatgccctcgtccatttccacagatgagagtcaactccgccttcgggcacacccaaggcaggtccactccagagagtgtctctgggccatgcatctgacaagcaaggcagcccctgggccagcctcccagcttctgttgcttctggctctgagctgtcttcctcctctcaccaggcaccttcagaggtcttgagcaatagccaccaaccctgaccaacctccttcctgaggacaagaggacgaggctggactctgccaggaccacgtgctagtcatgggggcttgggacccagcctcagtctctgggctccccgacagggttccttccatcctgcaggcctcctgcacagggacgccaggctgcagcctcccagtcagatgactcagcgcacagatgaactcagccactccaggcaaagccaacaggcccaaacaggggacgtcagctgctatgtgacgtcatctcactcgtcacaacatagtattgatcggtttgtcctccgtgacccaaagagaggtcacaacgaattgggaaggatggggtggcaccagggtgaagacacatgctcatcacccaggggttagcgtcgcttgtttacacaggtgatgcatctcaacccattcggcaaacgggagcttcatcgcaatagcgactgcctaattaggaaggcacagctgaccacccaggcctcattcgcagctgtgttctgaacctggactccgccacatggctcggagcctctggagctttggtcccgtcatctgcctgtgtgcacgtgtgtgtctgtgtgtgtgtgcgcacacacacacagaaaggcacatgtgtgctggcttcaagagcttggtgtaggacaggctccccagctaacaaaaggaatgataaatcttacctgggaaacgactgcataagaagttcctcagggaaaacaaaaatgattctgaggcaataaaagccaaagtccattgcgcctgtgacttactataaaatgacaacatggttactttcgcctaaaccaccaattgatgacgtgggggctgtgccttgcaccctctgtagctcctgtgtgccagttcccagcttgcctgtaacccctgcagagtcattcttgaactagccccaaacactgaggttccagccacactaggcccttccactcttcacacacaccaccaaggtccttcaccttccatggcctcctgctctgatcatctttcaagagtcagttcaactgccaccttctccaggaagtgttttctctaccgcatggtcaaaattaaacacagtcccctttcctatggatttccatttcagcatttagcaggaagtacttctgcaccacctaccttggttagaccacatgctccttagggacagggctgagcagggtctgacagatgctgggtgcttagtaaatgtttgctgaatgaaggatagagagcttcatttttctaaagtttacccatgagagttgttaaaactccttaggtctggctccaaataagccccagagggaacagagcgtgcctgtttactcactgtgttatctcctaatgcaagggctaaatgtgcaacctaatgctttgtagggcattgtagaggcgaggccttgtagaggcgaggtcaacatttcctgaatgagcaaatgaatgaaggaaagatttcctccttgacaataaagaattctagatcgtgtattcatcctggccatgagacttcttacataacgtgtatgttggtgaaacaaaatcttatcaaaacattcagaatgaatgaggcttctgcttccagtcaagacggagtaacaaggatagatttaccctccgcctggaacaaacaacataaaacaataaaacagacaaaatacatgaaacaatggtttccaagacactggccattagggaacaaagaacagagagagaaaagacacaaatgaagtgagccctagaatcatcccagctcattgtgacagcacagggagtggggacctcaggggcacccctaaagactgtgagttgaggagctggaactgagagtctaggaaggtgaatgcagctagagtttacaggacagaatactggaaaggagacaagagagctgcagctgacggggaaggaagggagagagagagaaaaaaaaacctatagagatcggtggggggttcccttacggattcagcaagacactgaaagtacccaaggctaagggcaagaaacacttgagaagttacaggaaaatgtgcctgatgctcacacagagcgaggaatagtgcctgttcccatcagtcaaacacacacacacacacccatcagaattcataaggcattaggtagcacatttagctcttgcattagtagtggggaataattagtcctagactaaacactgctctgttcctgcctaaaaaaaatcttaaaagcaaaacccaaaaggatataactgtttctgagtaatttaactgtatcttagcatctcaaagatatttatagccagcacccaacaagacaaaatttataatgtctggcacccaatgaaagattaccaggcatgcaaagaaacagaaaaatatgactcacaatgaggagtaaaaacaaccaatcaaaacaggcccagaactgacataaatgttagaattagcagtgaggacattaaaacagttatcataactgtattctatttgttcaaaaatttaatgacatagaagatacaaaaatgatccagactgaacttatgtcaatgaaatatataacatctcagataaaaacaaaaaggatggagttaacagattagaccttgcagaattaaaaatagtgaatttgaagacacagctatacaaactatccaaaatgaaacacacagacaaaaaaattttattaaaagaaaacactggtaagctctgagacaatttcaagttgctgaacacagctgtaactggagacctctgaaggagaagagagtggagggagacaggaaaaataatttaaaaaataatggtcaaaattttccccaaatccataaaaactataaacttaaagatccaagaagctacacaaatccaaagcacaagacacataatgtaaactacaccaaggcacactatattgtaaaatgtttttgccattacttttaatttgccattaaaagtaatggcaaaaactgcaactacttttgcaccaacctaataagtactgctcaaaaccagtgacaagaatatcaaaattagacagaaaagagagacatgttgtatacagaggaatgaagataagaatgacagccaatttcatatcacaaacaatgtaagagaagtgacaggggacaacatctttaagtgcggggtgggcagggcagagaactgttaacctagaattctgaacccagcaaaaaaccaactctttcaaaaactaaggtgaaacaaagaatttttcagaaatacaaaagcagaaggcattcagcagcagcagactcgcattatcagaactgtttaaacaaagtcttttaagcataaagaaaatagcaccatatggaaacatggattaataaaaagaaatgaaggcacaggaaatggtaactacatgagtaaatacataagattttcttcttgaaatctctttacaataataataaagtcctgtggggcttataatgtatgtataaataaaacgtatgacgacaatagtattaaagcccatagggaggattgcaactacattataataaggttcttacagtatacacgaagatgtataatgtcacttcatgacagactataagtcaaagatgtatattctaaacctcaaatgcaaccactaagataataaaagagttatagctaataagccaatgaaggagatcaactatctttgttcatagatgacatggttgtctattagaaaatctaaaagaattgacaaaaaaaaccctcctggagtgaagagcaataattagaaggatgcaggacacaaggttaatatacaaaagtcaatcgctttcctatataccagcaatgaacaagtcaaatttgaaagtaaaaacataatatcactagcatccccaaaatgaaatactgtgctataaatctaacaaaacatgtacaagagctacacgaggaaaactacaaaactctgatgagagaaaatcaaataagaactaaataaatgaagaactattctatgttcatgggtagaaagactcaatattgtcaagatgtcagttcttcttaagttgattatctatagatttaatgcaataccaaccataatccaaccgtggacattgaaaaactgattctaaagtttatatggagaggtaaaagatccagaataactaacacaatattgaaggagaagaacaaagtcatagcactgacactaccctatgttaagccttgctataaagctacagtaatgaagacaatgtggtattggtgaaagaaatagatcaatggaccagaacagaaacaaacagatcacgggaacagaacagagagttcagaaatacactcatgtctgtatcataaactctgacaaaggaagaaaggcactaaaacagagaaaatatagccttttaaacaaatggtgctggaacaactggacatccacatacaaagaaattaatctagacatagactttatgcccttcacaaagaattagctcaaaatggattgcagaactaaatgcaaaatgcaaaactataaagctcctagaagataacacaggaggaaatctagataaccttgggtatggcaatgccattttacatacaacaccaaaggtagaatcagtgaaagaaagaactggtaagctggacttcattacaatttaaagcttctgctctgttaaagacaccaccaagagaatgagaagacaagccgtagcaaatatattcaaagatttatttggcaaaagactgttatccaaaatatacgaagaactccaaaatcccaatgataagaaaacaaacaatctgatttaaaaatgggccaaagaggtgaacagacatttcaacaaaaaagagggaaaaaaaggcaaataaacatataaaaagatgctaaacatcatacgtcaataagaaattgtaaattaaaataatgatgagataccactatatgcttattagaatctaaaacactgacaataccaaatgctgacaaggctgtgcagcaacaggaactcagtcattgctgatgggaaagcaaaatggtacagccactttggaagagagtttgttgatttatgacaaaactgaaatactcttactagtataatctagcagtcacacttctcggtatttacccaaatgagttgaaaatttatgtctacacaaaaacctacatgtggatgtttagagaagttttattcataattgccaaaacttggtagcaaccaagcaaccttcagtaggtgaatggataaactgtacttatagacaatgaaatagtagcaccaaaaagaaatgagctatcaagccatgaaaaaatatgaaggaaacataaatgtgtattactacgtaaatgaagccaatatgaaaaagctacacactgtataattccaactatatgacattctagaaaaggccaaacaataggggttagggtacaaagaaggataaacaggcagagaatagaggacatttagggcaatacacctattctgtatgatactctaatagtggatacatgtcattagacatttattcaaacgcatagaatgtacaatgccaagagtgaaccttagtgaaaactgaacttcggttgatattgatgtgttaatgtaggttcattgattataacaaatgtaccactctagtgtgggatgttgagagtttgaaaggctgtgtgtgtttgtgtgtgtgcctgtgtgtgcggtgggagggaggggtatatgggaactctgtactttctactcgattttgctgtgaacctaaaactgctctagaaatagtgtataaaaataatggaatcataaaagtactcagtgaatccaaaacaagtcaggaaaagagaaaaatagaacaaagaacagttggggaaggcagaaaacaaacagaagatgatatacttaaacctaagtatattaataatcacattaaatgtaaatgaactaaatgcagacgcacccaataaaaggcaaagattttcaggataaagaaaagcaagcacttacaaaaaatgtactttaagtgtaaaaaaataaataggttaaaatttaaagtatggaaaaaggggccaggtgtggtggctcatgcctgaaatcccagtactttgggaggccgaggcaggcagatcacttgaggtcaggagtttgagactagcctggccaacatggtgaaaccctgactctactaaaaatataaaaattagccaggcgtggtggcatgcacctgtagtcccagctattcaggaggctaaagtaggagaatcagttgaacccaggaagtggaggttgcagtgagcagagatcgtgccactgcactctagcctggccacaggggccccgctcccagaaaaggggggaaaaaggtatatcatgttaatacaaatgtaaagaaggttatattggctatattaacatcatagcaattgatattataaagttataaatgccatttcataagtataaaggggtcaattcctcaaaaaatacataagaatcctaaattacatacgtaataacagagctccaaaattcgttaagtaaaatctaatggagctgattggtaacagacaaatctgctatggtaggtgggcaactgaatatcttgtttcaatgatcgataccagcaaatagaaaatcagccagggcataaaagactgaaatgacattgtcagacaacttgttctaatcaatatttacagaacatcctgcttgaaaatagtagaatataaattatatcaagtgaacattgagtatttatcaatatagaccatattcttgactagaagtttaaaaggattcaagtcatacaatggatgttccctgacaacaatgaaattaaattagcaatcactaacagaaaaatacatggaaaattcccaaatctttagaaactgaacaacacacttccaaataaccctcaggtcaaagaagaaattaagtgagaaattaagaattatttcaaactgaataaaaatgaaagtataacatatcaaaatctgcgagccatcactaaagcaatgcttacaaggaaattcatagcacaaatcacctattagaaaaaaactcaaatttatgatttcgtcttccactttataaatcaggaatagaagaacaaactaaatgcaaagaaagaaaagaaaaggatgaacagcaaaatggaaatcaatgaaataacaaacagaaaatcaatagaaaaaaaatcaatgaaaccaaaagctggttcttagagaagctcaacagaatctataaatctctagccaaactgatcaggaaaggaaggaagacagaaattatcaatatcacgataaaagagatgacatcactgtaggttctctaaatattgaaaagaaaataaggaaatattctgaaaagcttcatttcatttgacaacatagataaaatggataatttcattgaaagacacatactaccaaagttcactaaagaagaaacagctaatcagaatattctttaatatacctacaaaagaagttgaattcatagtcaacatccacaaagaaacttcaggtcccgattattttactagcagattctaccaaacattgaagaaagacacaaactcttccagaaaatcagagggaatattttccaactcatcttctgagtccagcattatcctgatgccaaaccaagacaggaatgttacaaaagaactacaaatatcccttataaacatagattaaaacattcttacaaggttttttaggatactgaatccaacatatatgaaaacataatatcattaccaactgaagatcatcttaggaatgcaaggttggtttagcatttgaaaatcaatcaacgtaattcaccatattaacaaataaaaaaagagaaaccatatgatcatcttaatggttgcagaaaaagtgtgtgacactacacaacattcattcctgattgaaaatgtaaaaactctcagcaagccaggacaggagagaggtgcctccacttgatcaaggccatctctgaaaatccacagacatcatacttaagggtaaaagaccccatgctttccccttcagatcagaaaatttcttattctcagcatttctattcaacactgcactggaagtactaggcaaagaaaaaataaaatgcattagtttggaaaagaattaaaattgtctttatcctcagatgacatgattgactttgtaggaaatccagtggaatctttaaaaacagccactagaataagtaggcttagtaaggttttaggctataagatcaacatataggcccagcgcagtggctcacgcctataatcccagaactttgggaggccaaggcaggtggatcacctcaggtcaggagttcgagaccagcctggccaacatggtgaaaccccatctctactaaaaattcaaaaatcagctgggtatggtggcgggcacctgtaatcccggccactcagggggctgaggcagcagaatggcctgaacccaggaggctgaggttgcagtgagcagagatcgcgccattgcactccagcctgggcaacggagagagactccatgtcaaataaataaataaataaataaataaaagactgacatatatatatatatatatatatatatatatatatataaatcaactgcatttccatatagtaacaataagcaattggaaatcaaaacttaaaaaatactatttacaatagcataaagaatatgaaatacttagggctgaatctgacagaaggcgtgtgagactggtatgtggaaatccacaaaatatttacagaaattatagacggctcaaaaaaatgaagagatataccttgatcctggttaggaaaactcaatacaaagatgtcagttctccccagattgatctacgtattcaacatcattccaattaaaattccagcaggccttaaaaaaaatagaaagtggcaaactgatgagaagattcatatggaaatacaaaagacctagaatggccaaaatattacctgactttaggagttttcgcacaacagcaataattaagactgcgtggtattagtttcaagacagacaagcagataattaaaacagaataaatagtccagaaatagatctgcacatatacggacaaatgatgtttgacaaatatgcaaaggcaattcagtcaagaaaagactgtcttttcaacaaatgaggctggaacaactgaatacacactcgctaaaatgaacttcagtccctacgttgtattctgtaaaaaattaactcaaaatgaatcagaggcccaaatgtagaatctaatactataaaactcctgaaagaacatgtgggagaaactctttgtgattttgagttaggccaagatttcttagatacgacaccaaaagcacatgccttaaaagaaaaccttggcctggcagggtggctcacacctgtaatcccagcactttgggtggctgaagcgagtggatcgcgtgaggccaggagttcaagactagcctggccaacatggtgaaacctcatctctactaaacacacacacacacacacacacacacacacacacacacacaattagctgggtgtggtggcgggcacctgcagtaccagctactcgggaggctgaggcacatgaatcgcttgaacccgtgaggtggaggttgcagtgagctgagattataccactgcactccagcctgggcaacagagcaagactccatctaaaaaaaaagaagaaaaaaaaaggaaaaccttgatcaactagacttaaacattcctgatctcaaaagacactattaagagaatgaaaagacaagttacagatagggaatatgtacttgcaaatcatcaattttatgaaggacttatatacacaatatatgaagcactctcaaatgttactaataagaaaataactcaaggccaggtgcagtggttcacacctgtaatcccagcactttcggaggctgaggcagcggatcacctgaggtcaggagttcgagaccagcctggccaacatggtgaaaccccgtctctattaaaaatacaaaaaattagctgggtgtggtggcgggcgcctgtaattccagctactctggaggctgaggtgggagaatcacttgaacctgggaggcagaggttgcagtgagccaagatcgcgccaccgcactccagcctgggtgacagagcgagactctgtctcaaacaaacaaacaaataaacccagtaaaataataggcaaaagagttgatagacgccctcctaaggaagacaacatagatggcaggtaagcatataaggtacttaacaccgtgagtcagtagggagatgcaaatcaaaaccacagcgagacgcgaattcactaatccgttagagggcctagggtgaaaatgaccgaccacatcaagtgcggtggggaggcggaggaactggaactctcgtgcactgccagtgggcatgtaaaatggcacaaccactttgtagaacagtttggaagcttcttaaaaaaaaaaaaatacaactaccacctgacctagcaattctactcctaggcagttactccaaataaatgaaagcacacgtccacacaaagtcttttacacaaatggtcttagctgctttacatttgtaataagccacaaactggaagcaagccaagtgtctatcaagtgagtggatcagaactgttatggtatatgcatacagtggaatactactcagcagaacaaaagagctaccgggacatgcaaaaacatacctgaatcacactgcatgaacaaagccagttaaaaaaacagtgtgggaatccatttatttaaaactctagaaagtgcaacctcacctacagtgacagaaaacgggtcagtgatcggaggggaaggtgtcagggagggtcagaaaggagcaggagggagcttgggagagatgaacgcactccgtccaatcttggtggtggtgacggtttcacgggtgtgtatgcttcagaacacaccaaatgatacatgttaaatatgtttcatttattgtgtgtcagtaagactacaacaaagctgttaaaaaaattcagagactgagtcagtcatggcacaccaacaatcacttctattactaccagcacccagtaagtccttgcctttcttatgaaaacacagcgagctgacgggcgtgagtgagtgtggccacccagcacagtcacagcctgcgggaatggccagtcactgcttgatttgaatttgaggaggaaaaatctcgttcagaggcaactgagctgctttatgactcttgtagcctgagcggggaggggtggggggcagatgtggctggacccactgtacagtcatgactctttcatcctcactgcagccttgggagcaggggttgctgtcgccaccctttaaggatgaggacctggggttcaaagagatgacaccttccctaaaatctccctgccgggcaggggcagagccaagggaaggtgggaaccgggcctgcctggctctgtcctcccttctgccccgaccctgcagacgctttcaaagcctaatatggaaaaaggcctcaccgaaagcttaaatgtaaatgaaccaagctaaggacgctgatatacacagaatttctttctacatggttattaggttaatagttaaaaactggcgactattaactttcactttaaatttattgttcaagctaacaccactgtttttcaacgtccctgtccggggtcggtgctacctgccaatgagcacctgggtgtgtttctgtctagagaccactgggtgctcaccagaccccacaggaagacggctcccaggggtgtggctttgagcaattttgatttcatcgccaggcctccagatgtgtcctgggtgaaaatcttgattgggcctgtcttccagggctactgtcaggaccaaatcgggtgggggcatgaaagagctttgcaaggcacggggttgtgggaagtgagactaggaaccccaccgcgggcatctgaccctgtggcgtcctccaccactgccaaccatggtactacaaagggcatggactcagaactaggaacccgaattccaaccaggcttcagcccagaagccacttccccactgcactggtttctgctggggacaatgatgacaacaccctaagtcccacaggaccgcctcccagatcaaaaacccacatgcccctcttggcgcctggcagggcagcccctcctgtggcccaggactctgctgagcttcaggtcctgggtggctaatgtgtgtgtcagtgtatgttggaggaggggaagggtggtggattaattttaaaatttaacttgctttcctttttcccacagggaaaaggagtgggaacaggtttctaaaaatagcctggcctgtcaaaactgttaactatcaggcagggcaaggatggcggctgctggggagggagagcgggagctgcggaggatcccagcctggcccttcctggtgccagcaccctccaggcacagccagccatcgggcggcccatggtcctggggcatggcagctgctcaggcagtgccagcagaccctggcatggaggtccgtggccactccacgacagcccatgaagaacggtacccacccccgcccccgtgtgagatgctggccctgggcacacgctttgttctcccacctccctcctgacggccacgcagagtcgagttaccatcacgcctgccttcgtgggcgcaggctgagcacaaggtccacagccctcccttgacacaaagtcaactcactgtgacccacaaatcacacaacaccctgggccagctgccttcacaagaggtgtggtggggggctttcagaaacaaaacaagatattgagggccagcacaggggccctgttgccaaccttctgcaggtcagaccaaagttttaaaagaaaagcccacgtggggagcattttgttttgaaaaagccaaaaacaaaacactgaattctttctgagaaacattctatccatgaagatgcaaacaaattatgggaggctaagaacacggtacagctaaaatcagcatgcacgctcatctaaacatcataaattatccaaaatgcaccagaaatgtcagtctggagctcttgtgtgggaaagtgctccattcactttggcactggctcacactcatctgctgcagcccacggcctgcccggcgggcgggagacccacgcctgcctcggaagcacacagccaggtgtctagggtcccgggcccgcaccaagctctggtgctgccttgaggggagctgcgtggttgggttgtgagatggaaactgaggattccatggtcttccctgcccactcctcaggcctgctgggagccacagggatgtggtcgaagggtgtgcacgctgcccctcggtgtgtggctgtgtgtggttatcacagcagcatcgcctgacccagcttcacatgcctgtttagatgtggcctcatccccccccaggatatctacatctcagacctcctgagccacactttaacacagggaggggcgagtgcctctctgagagcttcctatgggcccagcatttttgggcatctgctcatgtaacctggcacccaacctgtgtggtcaacagtgctggggggacacccagacctccctcttccggccgtccacatgttcctggctctttgctcccgagtgccctgtgctgggatgaagggtaagtacacctgtgacgccggaagcctgtgtgggtcccaggggaaggccaggtaggagggaggtggttaggaaaaccgagagaatcatgtgatcgagggaggaccaaatggcggtcttactgagcagagacctcaactccaggaccggtacatcccttctgtaggccggcctcagtgcagcatttgaaggcggtgctctgatgaaggcgggccctacccacagccttctcgggctcccgtcccggtgcgtccctcccgacccaggggaaggacatttggtgtggatcatccttctcagtaatggggttatttggggcctggccgggctggggaacatgacgccgcgtcgctgctgagcgggaacagcaggtgtctgtccatgcatctgcggaacatgctcgcagcacaatctctacatcaggacacacacacgggcaaggacactgggaaattgaatcttattactaattaatggctttaatgcctatgattaggcctcaaaaacagcctattttccgaaagataagtttagccctgtttgaacaggaactcaagtgctctgctgccgctgacgcagagagctcagctccactaatcacattcagaagttccgagcccaccacctagagtttcagaaactgtgcgctgagaatgaaagagaccggggagcgctttgttcttcagcaagaggtgccatggtaggggcacggacaagcgtggggtatggggttcggagaccacagccggtgctcacaggggaaggcaggcctccatctctgccctgagaggcaggctctgggcactgactgcaatccaaggggttggggttctcaccaggggtggtcctgcccctggggagacacttggcggagcctggagacattgctggttgtcacatctggtggagtgggtgctaccggcattcagtgggtagagagcatggacgccgctgcacgtctgacaatgcacaggacagccccacggcacaggatgatgggccccaaatgtccgtctgtccaggtggagagtggttatggttggatgtttgtctccaccaaatctcatggtgaaatccaatccccagcattggaggtggggcctggtgtaaggtgactcgatgtaggggtggatttctcataaatggttagcaccagtgcccttggtgctgtccttgcgatagtgagtgatttctcgagaggtctgattgtttaggagagtgtggcaacttcctcctccttctctattgtgcccgctctaccttctgccatgagtcaaagctccctgaggcctccccagaagccaagaagatactgccatgcttcctggacagcctgcagaaccacgagccaattcaccctcctttctttataagccacccagcctcaggtattccttgacagcaatgaaggaaggcacggggctcccaggggagtgcacaagccacgctggtgagaacagggtcgcagatcctcagggacggtccctgtcatgctgccagctggccagcttcgggcaactgtggcagcccagacacactcgcactctaacacgcagactcacacacacaggcgcccgtctcccctgcacagactctcacacaggcgcccgtctcccctgcacagacacacacacgctcacactcacacaggcgctcatctcccctgcacacactcacacaggtacccgtctccactgcacagactcacacacacactcacacaggtgtgtctcctgtgcacagactcacgggtacccgtctcccgtgcacagactcacacaggcacccatctcccctgcccacagactcacacacacactcacacaggcactcgtctctcctgcactcactcacacaggcgcccatctcccctgcacagacacacacacacactcacacaggcgcccgtctcccctgcactgctttgcccgtaagcccaggcgctgggctctggtgccccttctagcctggatgttgtatggattggcgctacagtcaaggcagggcagcatggtggtcacaagcccagctcaggggcagccctggctctgtcctcgcccagctgggtggttgctggcacattagaaccccagttgcctaacacaaagggacagggacagtgcacaggtcactctgcatgggatgcggctccgcaacccaggactcagcactgccatcacccctctgcagcgcgcgtggggtgggggtgtggaaggagcccctcgacaaggattccaccatcactgcgtggtcaggctcccaggagctacttgtccataccccagctttcagcacacgtcacctcccacagggagccctccctgatttcccccaaataaaacaggctcttgcccgccgcctgccgcctattctttttttctgtccccgtcaacatttgccctgtgctagactccaggcctgtgctggtacagaggctctaggggtagagagcacagtcccccattcctgtctgctggggagacagacactcagacagcaggtttagtctcccttgaggtcctgagatggggggtggccaggggagtagggggacctctccatctcaggagagcttctggaggacatgcctaagtggcatgctgagggtggaaagaattatccagatggcagcaggcaggaaaggcctagaggcagagagaacagtgtgagcagaggccaaagagcagtctgtgtgtgccacacgcgtgtgcgcgtgtgtgcgtgggcctggctgcgtgtgggcctggcatggtgtgctgtggggcgcttacatacacagatgcacttgggagacaaatgccccactgttcccactgaacgaagcagcaacttggtggcagacgcctggatgtggggctgatggggtaggccagggccaggctggggagccagggccaccagcctagaagccctgctaccctgtgtctgaaaactccaacccagcacctgaagaccagtcctgggtgtctgcactgcacaaggaaggaagcaggagctccggggctgcaggcctgggacccccacagtgcattgcagagctggacccacggccggcgagggatgggctcagcctgcaccccacctggagcaatagtgctgctatctagtcagactttacatcctactcgtgcagggacgagaaccaacagcagttggaaaaaacatcattcacagggaagcaagaggaatacagggtctccacgggccatcttctgtcaagggacggagctggcaggtggcagggacagttccacagagcagctcctggcatcttggggcccacaggactagcttgccacctggacagagtgatccgctgggtctggcgttgcactgagatgcgcacccagccaggggtccaaggcggcccagctgccagggaggaatgctgtgctcacatccagcctctgccacttactaagctgcatgcactgggcaaggtgcttcatctctcggagcctacatttcttcttggagtcgctgtcaggactaaaccaggggactcggctgtcccctcctctgcagccttctcttccaggacccctctgtcccaaccagactcctttccctgtgtgttccatccacgcaaagtgcccaccccggctgtgcccactccagctcatgggtgtgccctgcactacttgatgccagtctttgcaggagactgcaggtctgtcactcatcaggggactcctgttcagcccacagggctccaccccagcagcatttcttcaaggaaaccttctccagccttcacaggctcctgcccgccacctgccgcctggcccctgggagcccactgtgccttgcgctgacctggggcctggactgttgctgacagtcacctgtttgtgccaccatggactgagagtgccgaagactggatagagacttagtcatctctgcaccctagtgcagagctcaggagcctcagctgaaggagacacagcttccctgagggctgaagtcgctaggggtggcctgggttcagaggctgtggctgtttagagaggtggtacggtacaccgtgggtggtacacaagtcagcccagatccacatggagacccagatccacatccaacttgagcagctccagacagtggaaaaagggcagttcactcactaacctgagtcggaatgaaggagggagtgatatttgaaataaaatggaaagtctctcccaggactgcagggccacatgtcctcctctcccatcatccctacgacttgagctcccagctccaccccactggccacagcacctcccgacacggcctctgcatgcttggggcttcagccacaggctcctccccgtcacccctgcaggtctcttgggagaggcctcccctgctgacccccttcctgccccactactcctgtcccccaccctgctctgctgttcttcatggctctgagcgtcgctgggcagaccccacccatgcggctcacgcctgccccgtgccacctgccccaggagctcctgagagcagaggcctggctcccactgtggtcccagcaccaagaatcctgcctggctctgtgaccttggtggtcccctaacgatgtgccgtggggtcaaacagggcctcctctcctcctcagaagctgcccgcacttgtcctctagctgaacctcaggtactcgcctgcagacatctcaaattaccaccccatctcaggccgtttccagatgtcgctgtccatagacaggtgtgccagaaaaaggggactccaaggccaaatggaggcattctcgcttaccaaaggggagcggtttcgttaggcagggactcctgggagcctcagttgagctgaggtgctggcatttccacaacagacgctgggcccacttcagggacacacttagggaaagccaggtgtgaaccctgcccagcaactgtgtgctcccccagggcagggccatgacctggccatcctcttggctcccgttcctggcactccctctccaggagcactgctggggacccagtgcttctgcctgggagttcttggtgcctgaggctatgctggtccctgccatcctcagaggggctggcgaggacgagtgctcagtaaagacagcaatccaaccatacaagccagcctgtgggagtcgcctaccattctgcacaagtagcagtggatggcccagaagtcattggacttttaaggccattcacgtggcagaggctgtgccatcctgagtcacctgacatcaggtccatggaccaacacagatccagctcctttcctaaacctggggtgaggagaacgcagggaataaaaagacaagaaccagcattcattaagcacttactacgtcccagttatttctcatcccttagcttgcttaggcctctcaactccccaagaaaaaataacttatcagggtcttgaagggagaccaaagacaacgggcaggcacaaaaactgatttcactgccagcccaggtcccccatgggccctgctggggaaggcccgggggcccaggtgtcctggctccagcacagagcctgttcttctctgcaaggtttgcattgtgcccacaaccccatttatcagacaattacggtgagaggaagcgcactgccgagaagtcaggagagccaggcagccatcccgtgtttgcagttaattccccatgggcccttcgggaagatgccacacttctcctggacacagagatctcagaacactgcctgtgagatgagtcggaccagatgatccccagggacccttccaccacttgcagcctgtgtttgtgtgattcaaacacagcttttcccctgagccacacatggcttaattgctaggcaatgcagctgataggatctgtaatcaaagctgggcagggagggggtgggggcggcggggagaagtgaagtcatcagtaagcggacactttgatgagtacttacagtcatcatttggcatctgaaagcatccttttcaattatctgaaagataatccgcaaactaacctgaaacccagagtacgcaattaaagtgttgggaaacaatctgatgtcatgatgctctcctgggccagtgagcgtgaggggtgggaggcggacctctgggacagaaaatcagctgcgcacaagccaattaccacctggagatggatcctcaaaatggcacacggagggaactggatcccagtgcgtgaatgcacagggtcattagcccacggtgaacgttcactgaacaaacacaacacaggagaaggcggccaaactcaaattgctgtctttaagaatctcgcacccttggtaagagcatgaaatgggtttggtggaggaagaggaggatgaggaggaggaagaggaggaggaagaggagaaggaggaggaagaggaagaagaggaggaggaagaggagaaggaggaggaagaggaggaggaagaggaggagggaggaggaagaggagaaggaggaggaagaggaggaggaagaggaggaggaggaggagaaggatgaggaggaggaggtgattttgcttaagaggcttcccttcggcgctgttcacaaacatattcatataactcagtccatttaagcagagccctgctctgccctatctgagggcctaggcaggtcactcagtgatactgggctcaccagcaaagggggaggagctgacctcactttacctggtaggtagttggttcccgcccagagaccctgatccaatgatgcatcagacgcctccccatccccaccagccagcaaccactccttgaatgcatgtgtctacgaatttgtcaattctggacatttcaaataaatggaatcatacactatgtggccttctgtgcctggcgtttttcacttagcataatgttttcatggttcatccatgttatagcatgtgtcagcacttcattccttttcagagctgaataatattccatgttatggctatgccacattttgtttatccattcagcagctgatgagcatttgtgttattttcactctttggttattatgaacaacggtgctatgaaggtttgtgtacaagtttttgtgtgaacatatattctcctgggtatatatccagaagtagaagttctgggtcatacggtaactttatgtttaactttgtgaggaactgctagactgtcttccaaagtggctgcactattacattcccaccagcagtgggagggttccagtttctccacatcctcagcaacacttgttactatccgtctttttgattctagccatcctagctggtgaaaagcagtatctcattgtggttttgatttgcatttcccaaatgactaatgaataatgcttggcatcttttcgtggctgcttggccatttatattgctctttgaaaaaatttctattcaagtccttgcccgtttttaaattgggttatttgtcttttttactgttgagtcgaaagaggtcttcgtatattctggataccagtcccttatcagatatatggtttgcaaatattttaatccatccggtgtgttgtcttttcactttcttggtggtgttcttagaaacacacatgtttttaattttgatgaagtccaatttatttatttttttgagatggagtcttggtctgtcgcccaggctggagtgcagtggcgtgatcttggctcactgcgacttccgcctcccgggttcaagcaattctcctgcctcagcctcccaaagagctgggattacaggcacccgccatcatgccctgggaatttttgactttttagtagagacagggtttcaccatgttggccaggctgatctcaaactcctgacctcaggtgattggcctacctaaacctcccacagtgctgggattacagccatgagccacagcacctggctatatttatttatttattttctgcttgcacttcttgtgccctacctaggaaaccattgccaaattgaggccatggaagaattctgtgttttctcctaagagttttatagttttagctgtcatagttagatatttgatcaacttcattcttttgcataaggatctctggttattcaagcaccatttgttgaaaatctgattctttctctattgaactgtttggcagccttgttgaaaatcgcttggccgtaaatgcaagggttggtttctagacactcgatttcagtctgttgatctgtacgtccatccttatgccagcaccacattgtcttgattattgcagctttgtagtaacttttgaaattgggaagtgtgagttgtccaacttcgttcttctttttcaagattatttttgctattctgagttccttgaatttccatatgaattttaggatcagcagcttgtcactttctaccaagaagccagctgggattttgacagagattgtgttgaatctgtggatcaatttgaggagtgttgccatcttaacaaaattaagtcttccaatccatgaacacagggtgtctatttatttgggttttttaaaatgtctttaatttcttttaacaatgttttgtaattttcagtgtacatgctatgctctttttatgttaaatgtactctttagtattttattcttttctgctgctattgtagatggaagtttcttaatatcatgtttggattgttcactgctggtgtatataaacacaattgatttttgtataccaatcttgcacggcaatagagacttttaaacagagctgtgatttagaaatactactttagcaccctaaagagaagattctggagatactggggacattgaaatcagaagggggttgatgtgtaacccaggatgagaagacggggacctgagcaatggctgtgactgctccagagactgcttgcttgtttggttttttcaaagacaggggcactggggaggtctggacagggtgtggcccaaggtgtggctttctcaggatctgtgctttgaaagaggtcagctctgtcaagagcgtaaatacggtcccctggggaagagctggtatgccagtggttctcttctgaagctcagggtcctagccaacacttccctgagtttatctgggaacacataaccagatctgagaaatactcttgcatcagttcctgctataacaaattaccacaaacttgggggcttaaaacaacagaaatgtattctcttacagttctggaggccagaagtctgaaatcagaaccaccgggccgagtcaaggtgtcggcggggctgtactttttctggcggagattctgttccctgttttctcaagcttttcggggccactggaattccttggtttgtaaccacatcactccaatcgtggcctcctactcttccatgggtaaaatcccccatctccctcttagaaaaatgcatgtgatgatggtgtttagagcctgggatggtttggatctgtgtccccgctcaaatctcatgttgagtttgtaatccctaatgctggaggtggggcctggtgggaggtaataggatcctgcgggtagatcttcccttttggtactgttctcatgatagcaagaaaacctatcattttttttttctaatagcagtgagagaatggactaatacatagcccacccatgtaatccgggataatccacccatcctgaattccttgatcacatctgcaaagatccaccccaaccttttttgcactatcaggtaacatgcacacgatccagagatgaggacatgcctatcttttggaggccatttttccactgaccacactgcttcttgtgcagatgaggataaccctgtagacacatggcatccccaaaaccacatccatggaggggccagcccttaccctctctgaatcacccactgaagccatcagtccactgctggctcccacgagggtctggcttcctcagactgcatttgctatccagtctcacagggttccatcagaccctgtatccccaattccacatcaccccccatgaaaattccgtgccctgtctccaactgtccacactcagtccgtgggcaaggagcacggaagagctcccatgagctcttagagcagtaacaggaagaatgtcctaccccggcctggcaggggaaggagcggggctgggcagccttgggaaaggccctgcagtcccacgggctggggctcgtcccccttttcagagccccacactgtgccgagcatggggccactgaggcaaatacaacagaactgctgtcctcaagggcttctcaggccgatggggaaagacaggcaaggaaactaatcacgagagggaagtgatgcggggcccagagggcagcagctgagacagacacggagatggacaaagggcaggactagctccagaggcagtcagattccacagacgcatggaaggcacagcaaacagatgccacaaaacacctacgcttgctagcagctggccaggtgccaaaagacggagagggcattgtactggacgggccagactgcgctcctgccgctggggcgcctttggctgaggtccccagcccgctgtgctgtgtggtgctgtgagacctgtcacctgtgccatgctgactacacatgtggtagccacctatgccaggacagcattctgtggctggccaaggcctgagaagcagtcaggcccaagaactcagccaacagggccagggaagtgggtgaccagagctgccatcctgggagcatgtgccccagagacccagtgagactgagctgttggaagaggacacacgtgtccacactgaggggccaagagcagggtttctggtgggtccgtgcagaggcaggaagacaattcggaaagaccagctgctttctgggtcgcctgtcccaaagctgaggggcagtgagatgtgcagctcccagaaagagcaagtgcccctcccgggaaggaactgacagctgttcccgaggcggccactaccactgccccagaaggcaggtttttcatctgtatggagacgggactccaagacattcagtcgctggcttgaggtcccagagctggtccatggcagggcagggactggagcccaggagagctgtctgaaaccacactcttccctccctccagtatcttccctctctctggtatcttccctccctccggcaccttccctccgtccggtatctttaccttccctccctccagcaccttccctccgtccggtacctgtaccttccctccctccggtatctccctccctctggtatcttcccgccctccggtaccttccctccctccggtaccttccctccctccggcaccttccctccatccggtacctgtaccttccctccctccggcatcttcccccgctctggcaccttccctccctccggcatcttccctccctccggtaccttccctccctccggcaccttccctccctccagtatcttccctccctccagtatcttccctccctctggtatcttccctccctcctgtatcttccctcccaccagcagctgtccgttgataggatgggtatctccacagggacaagtgtgaggtgccagaggaatgagggtggggacagaccacacaatgccttcctcttcctggggagacttggctggtggcctccctgcttagatgcatcctcctgaaagtgacatagttcatgcctcctgctcacattgggccacacaccccagcatcccagcccggacacctcctgagccagggtgctcaccaggagcaaagccgcaggcatcagggcttaccagtgagtggtgcgtgggtgtggcaggaatctggggcccagggagcccatgcctatggagagggacacctggcccccaaggaggcatggtggctggagctcctgccccgccccccttcccttggctgtgtccactgttatgtgagtgaagcagaggcagtgaaaatgccaggagctgtaacctataatggggtgctgggatgcgaaagtggggggtggggtacggttatcaaccgggattcctgttccagccaggaggcactgtggcttttacagttctgggtttcaactgcacagtcgcagacgggacctgccaggaatccgcacgaactcctctgcgtcagttatgctgtgttacctcctttcttccaatctgttctttatcctgaaacctctcaagcgccaattagctaataaatgggatttgcggagcatgcaaaccctgaagcagtggtctgcctgtcaacaatctgcgcctctcggtaacctcctaatccaggactgggcctgcagaatccgccagggagtctctgaggcctgtggacatggttcctggacctctcctggggctccagaaaatcttccccacccaggtgctcttagcagagctcactcaaggtgctgtgtctcccaggaattggctggagcttgattttctagctctgggcttcttcctctagcccattcctcttccctcctctccactccctgttgtcccacgcaacccagtacagaacggcatgggtcacctgagcacaccctctgtgccaggcggggagcaagcagggtggagaatctggccctgcacaaatgtacttggagtgaagactgcccacctgatcatggcgcaggagagaccagcaagaaaatgaggccatgggttcctgctctcacacctccgctttgctggccccacggggactggcttttcactaggggtggaggggagacaaggagaggagctgtgtttgggagaaaagggtccctcaatgatctgagatcctggctatgggaggggtccctggggcagtggaggagaagtgcagtcagaggagtgggcttcccaccctggctcccagcaccacccagtgaggactcaggcatcccttggccctctgactcagttccttcaactttgaaatgaggttgctactaaaccgttcacaggatcgctgtgaggatgaaatatcatagtgatcgcaagctttcaaatcctgtaaggtgcttatgttagtccagtagtgcaaagttgagtaatactctcttttacgggcaagagatcaactagtattcattgctgacgatgatgggaatgctttctatgtggaacattctgtttggaaaaagtgactgtcagtgcctctaggctctgatttgagaattgaagctttgcagtgtaggcattagcggggtgtggaatgtgaagtgtatgtgtcacgtgtgcatccgtatctgaaggtgcgtgtgtgtgtgctgttgtatgagtgctctgtgtgcatgttgtgtatgtcggtgtgtgttgtgtgcctccatgtgtgaatgtgtatgtgaagatgtgtgctgttgtgtgagtgcattgtgtgcgtgttatgtatgtcagtgtatgttgtgtgtgcatccgtagatgaacgtgtgtgtatgtgaaggtgtctgtgtgccgtcgtgtgactgtgctgcgtgcttgttgtgtatgtcattgtgtgtgcatccatgcgtgaatgtgtatgtgaaggtgtgtctgtgtgccgtcgtgtgagtgtgctgtgtgcgcgttgtgtatgtcattgtgtgtgcatccatgtgtgaatgtgtatgtgaaggtgtatgtctgtgtgctgttgagtgtgtgtgtgtcacaggctctcatcaggctcacagcctctcaggaaggcaacgtccgttggaaactctagagcggcgagtcctgcagcctgccctgccctccagccccgtgggcagaaatttgactctgccactgcctaggagaagggatacaggtgctcctgcctctgatgaaccacacacagtgccaggggacacagccacctcatgcgggagcccaccctccagacagtgcaactgcagggaagcctcaggcccagcaccgctctctgtgcaggcagtcagaccataagcccacagttggagggtgtgcacacacagaccccaaacacagctggataccaacacctcatgtctcatgttctgcctatcacttgcacatatcagcccatcaacaaatgttcacttccttcccagtttactggcagaaggttttccagagaacttcaaacccatttttctcaaaggcgatatgtggctgttccccggagtcactggaaggcagggctatttcttgagatagatgcatcacgctgtctagtttcttttctcagaatctgctgctccactttaccacttccccaagaggaccgggctgtggctgggatttttatttcagtcactttggcagtagtctgaaataaatgacgtctaaatgtgtcatttgaactttcaacggagtttaccacagatgaagaaagatggtccccaatcacctttctccagtgaatccctcaagtctgcaaacaacacaacaaccactgctctcacagcaccaccaccactatccatcgccgccaccacacgccacctccatcaagcaccgccgccaccaccacgacgcaccaccaccaccactcaccaccaccaccaaacaccaccaccacacacacacccaccaccacccaccaccaccaccaagcaccaccaccaccacccaccaccgccaccaagcaccaccgccaccacccaccaccaagcaccatcaccaccacccaccaccaccaccaaacaccaccaccacacacacaaccaccaccacccaccaccgccaccacacacaaccaccaccacccaccaccgccaccaagcaccaccaccaccgccaccaagcaccaccaccaccactcaccaccaccaccaaacaccaccaccacacacacaaccaccaccacccaccaccgccaccaagcaccatcaccaccactcaccaccaccaccactcaccaccaccaccaaacaccaccaccacacacacaaccactaccacccaccaccgccaccacacacaaccaccaccacccaccaccgccaccaagcaccaccgccaccacccaccaccgccaccaagcaccaccaccacacacaaccaccaccacccaccaccgccaccaagcaccaccgccaccacccaccaccgccaccaagcaccaccaccacacacaaccaccaccacccaccaccaccacccaccaccggcaccaagcaccaccaccaccaccaccaagcaccgccaccactacccaccaccaccaccaagcaccaccgccgcagccaccacccaccaccaaggcagctctctccccacagcctcttccatgcagtgcttcagacacattactgaatcccatgaggacccctgtatgggaggagtataaaattcaaccaaggaaagctccccaccagccaccatggttgggagcagcaagctggagctcagggccaggtcctcaagtggcaacactcacagcatgtttcatgcatgaactcactaagccccctcccctggagaggggtcctcatgctggggtccaggggcatgatagaatccgagggaggtgtctcttcatcatgcatcccattggggttgcaggtgaaggtcagactatagctctctcctggcctccttccactgttggatccacaccaaaccctgcggagaccccctggatgtggagtaggcgtaccccagtgtgtccttttggtagtttcagtggctttgtggaatctagcgtggcgtgaggtgtgcctgggctgcctcctgcctggaagtctgaaaactccaggccatgcacaggcatccagagtccacccaatccaacctcctcccggtgcagggccctcaccagggtcggaagtgggaagaccccacactcggcaggtggggacctgcagacctggcagccctgccatttgtcagctgtgcactcaggctaagacattgaacatcctggggccccaggttctttgttctctcatttgccaagaaaatgtttattgagtatccagtgtgggcttggcactgtgcttggtgcgttcctctgggagtcggggctggccaggctcccctactgtccaggagcagtgaattaatgatttctgagtagtatatattttgacatataaaacctttcaaaatgcagagtccacaagaggagttataaaaggagcccgtagcatgagtgggagggctggtaattcctgacatgtattaaaaagatcaaccacagacccagagaatgcggcctcagagaacagctattaagtatagacgaaaatacacagaacgaagaaggagggctcatgatacactttaaagtaccagaaagcccactccagactgaactaaaatgcaagcctgtaagtgtctcaatgtataaaagcctggttaaggctaacctgtaatcacaatgtatccatataatcacataatgatgccttcagaggcaggggtgtgcgcggagcacgctggagaaggaagccccgagctctcagtggaacagtcaagggctgcaaagtgtagctcgagaacggggcgttaattgagagcttcctacctgccaagtatcatgccaggcactaaacataaattccgagggcttaacccttaccatcatcccacgcggcagctgtggctcctgttccaagcgagggagccagggctcccggagatcaaatggtcacctgcaatcaaagggagcagcagatctttgccagtttctttgtgtggtcacacagtctccgccccttcccatgggtgggggcccggcgggaggggtcgatttccctcctgtgcgcagcagtggtggtatgtgggtcccggctggtttactggctgtggggagagcttccctgtcccctctgtcactgtccttggtggactaaaacgcaggcacatgatcttggccacctggatgtttccactcggggctcagcggcagtgacaccaaggacccgtgaaaacaatatgtagcagcagcaacaggattaagagtggagcagaagtagcctcaggtcccagagcagctccccaagggtgtacctgaaccgggaggcatccaggtgtgacctcagctgggtccggcagtagccgagcctcctgaacccccatcctgactctgagtggctccttgaactgcctgatagccttcccaggcacctgctgttctgctgaagttgaccagagtccatttctgttgctggcagttaagaaccctgattctcaagcagcagctgcaggattcacaccaggccctttgcatcaaagctgcaccctttcctttaggatcctgcttctcatgatggggagagagaggcttcctcactcctctggtgtgcacacgcacgggggagaagcttatagaaggggcgggggtgttaaggagagttgtctttcagcttgactttggaaaagagccagtgctttgatcggccacaggccaggaaggcccgagcacttagcggcctccggagagccacctgccgatgccctcgagacaccttcagccaaccaagggccctcagaggcaggaggaagcctgtcacctaataatgccctgcacagcctccacccactcagaaggactgaggcttcccagggaagggacagaaaacttgggaagccagggatttccagcgcagagagctggggctgtctgtggggtgagtaggggccagaaagcatagccagcgggacaggagtcctttgaagagacaccattgttgccaaggccacagcggtgcaggtcacaccagccagttacagggatcagagacccaaccccagaatcacattcctcatgacccatgcgttcagaagagcctctgaactccaaggggcaaagcggacagctggcagccctttccctggccagcagaggtggcagttctggtaaaactaagagtggggaggaacatgaacttgctttactgattcccttccattaataaaacagaggaccctacacggggcgcttcataaatgtgctcttgcttaatcaccaacaaaaatctgcaaggaaaacgcaatgaacagcacaggagccgacaggagacgtcctcaacacaaccaccggcggaggcactgcggacgaaagtgtgcggagattgaagcgggtcctccacaaaaggtgggcgaacggtaccaagcaggggttctgtgttacagctcctctctgcttaacacccgagaaattctttctttgactatgagcacagaggttgttaatagccttcaaggaaaaccagtgtagagcccagaggaggagctcaatataaatcagataaataaaaaaatatgaaaaatgaagctctattgaatgaacaaagcacaggcaccggctgggtgggttctggaggtagggatgagctctggctgtgccttagatgggctggactcataacatgagaacttctccacagacaggaagggcattcgggtgtgggggcaggcacaaatggaacacgcatccctacaggtgtgtatcttgttgacctaagaggagggcaggaggtgggaaaatcctcgttaaagtcaccaagcctgaggatcacagaggagtgcaagtgggtgcggcctgacccattattaactattacttttttgagacatacttcatgtaccatgcaatttacccatttgaagtatacaattcaggctggacacagtggctcacgcctataatcccagcactttgggaggccgaggcaggaggactgcctgaggtcaggagttcgagaccagcctgaccaacatggagaaaccctgtccctactaaaaagtacaaaaaattagccgggcgtggtggtgcacacctgtaatcccagctactcaaggggctgaggcaggagaatcgcttgaatccaggaggtgaaggttgcagtgagccgagatggtgccactgcactcaagcctgagcgacagcgcaagactccatttcaaaaaaataaagtatacaattcagggtttttaaaatatatcacaaccatcagcattattacatttcagaatatttctatctcccttcagcactatttaatgccagaatattcccatgtacccctaaaaagcaactccatacccactggcagtcattccctaccctccccaccccctctgacaaccactaatctactttctatctctacagatttaccaattctggatgtatcatataaacagatttgcataatatggggccttttgtgtctggcttctttcacttagcataatattttaaaatattcacctatgttttcacatatattagtactttgttcctttttctggctgagtagtattccactgtatggatataccacattttatccatcagctgatggataggtaaacaaaaacacttgagctggctattttcacgttttgcttttatgacaaatgctgccacaaacaggcacgtacaagttttgtgtggatgtatgttttcaatgctctttgcctaggagtggatgtgcctgactccaaacccctttgtgttctctgacttgcatctgacaaaggttccaacatggattaacaccagagtctactgattgtaatatttcattatcaaaaacatctattttgataacccttctaaggactaggaaacaaatgccagatccagataatccacttaacttgtcccacttagcatttatccaaacaagagagaaaaagtcaccttgaattgcacagaagccatttctgaaactgacttcacagtacagtcctgtccaaaggcagatgcagcagtctgccctgagtgcatcagcaacactgactaagtgagcacggggaatgggagtgaagcgtcctcttctaggcatgcctagaggctgacagtgctggagagggaggagactgcgaactgaggaatagcaggaaagttcccaagagccaccgggcaacttcctgcgccagacaggaggcaggctatgaaatcactgagtgtggatacgacagccgggtgtaaatctcactgaagcagggggcctgggcaatcgcctccgacttcagtctctgtcccacagcagggcctttctgtggcctcaggatgcaagtctaattttgcctgctggcatctggggtcctccagagcctggcctcctgacagcccagccctgatcttcctgctctccctgcagaagcccccattctctcttaaggagtccccagatgacagccagcacagccctgccggcaccatcctctcccagccacaagagccaacccccacctcaaccccagtagctgtgactgtgcctgccatataaacggcggccaccaccctgctgagccaccagataccccacatgccagcccctgaggttggcaaggcacattcctgagcggcaggatactgagtgaccccccttcctcccgccaccccagaccctcttccctgactcctgtgtgcgctgaaagcagaggtgctagaggcacatctggcatctctgcacatctgcctgatgctaaatcactgggtaactggaaacatacaggtggggggagattctgctcagacaggcagacctggcacacacattcaccctgttccctcctgaaacccacagagagacagacagtgccagaatacatatgatatgaagccaccaggaagaggaggcaatgacagctgtggaaagagggcaacaaatttttggaagaagcaaagaggatgggtgaggggtaactgacctaacagggcagcagaagctaaaccctgggaggcgacgccaaggagacaaggccactgctggaggtggggaggtgagggttcacgaagcaggagcagccacggggcatgggcagggatgagcaatgggtgcagagtggcagctgaacgaccatgacggatcctgcgagccagggtccagccggagctgacaaagtttcagggatttcacgagttggctgacatcgtgttgggaccttgaaactggccactacaggagtgtttacatctcagaaaccagcaaatgctacagaccagggctcccccatcccctgagagctggctgttaaacttctaccagcacaccactgcgtaaagctctcctccttcaaatggccagggatgaacaggacctcggtggacggtgcagaagttctattcttggtaggacttgggccaggaagcctctggactcaagattccatgaaggagggatgaaggcaaagtcctgacatgaattatggggaggggcagcctccttcttggatgtggctccctgaatgctggcagtgagatccatggcatactccaggatctcctctggccaggccagaggacagaccaggccagaggacagactcaggataggtgggggagtccctaatgaactctgggtggggcccaccatgcttcctgtccgtgaagcccaccagtcagccatcctgcccaagcacagagaccagcacttcccatctactttagggcctcataggaacaaaggccaaagggcacagccacttgaggaccacctttaaagtaaaagagacaaagataaatgaaggggaagacaaagaggaaggcagaaacaattcacagaacaaagaaaccttcacagaaagtggcaattaatattctcacagagataagaaaaggcagtccagccattacaaaagaacaaggttctataaaaaggaactgagaacaaggaagagctcttggaaattaaaaattaaataaaaaaatttaatacagagattggatatgaaattgtggatattttccaggaagcagtataagcattctaagagataggaaacagcaaagaaaagaaaattaaaggactagccaaggaggtccaagatccagtaaacaggcattctggaagagaaaacccaggaacagggaggtagaattagtttaaaaatcatttttcagagtccttgttttgatgcctgtgtttgttttcactgaaatggcccactgagggcctagaacaaatgagtttcgaagaacaacagcaggaggcattatgtgaaattacagaaccagaacattggagactgaagagaagatatcaaaggcttcccaagagaagcaagcaggtcacctgcaaaggatcaggagctcggaatctggatggcaggggacttctcaatagggtggagggagcttgttttttaaagctatatatttttggaagctaagaaatgagagcaacaccttcacaattccaaagggaagagaatctaaatcctaaattcacctgactgataaagaatctaaatcctaaattctgctgagtgatcaattaaatttgagggagatttaagatatatttttttggacatgcaatatttcaaaaacatttttttcctatgcactctttcctggaaaagcactagaggatgagctccagcaaactgaagaagtaaactgataaagagaaaggcaggagaagcagaagcaggatctggcatagatgagagtccagaggcttgctggggacagtgggaggaatgtgccaggaccacagccctgcagcagacctggaggacatcaggccacatggaagcaggacatgagaacgctggagagatatctcctggaaccacgcatgcacacacgatgtagctgatgggtttggtggtattgagaggaattttgtggttctgatggaaagttcaagaaaaattagcgtcacagaaaaataaacactgcagaaaatacaattataattctagaaaaagcaaaaaaaactgtttaaggaagggaagtataatcataatacatgcttggcttagctgtgaaaaacaatcgcattgtcacagtaaaaatgaacagaagaactctgtggggatttaaccaagaactgtgatagaactgtagtagacaggtagaggcgagcagcccacagacgatgtctaacaccgaaagatcacactacaccagcgtactctatttggcattaattcagtcatattttcaaggtaaatacctaaggaaacagtttagcatttgcagaagcgcctctgaggactggcgctgggtgatggggcaggcaggagtaaggactgctggtcttcgttatgtgccttgtggaacgaattggctttttaagtcacatgtatatatcacttaaaaataaaaaacctttacagaaaactcatcattaaagaaaaatgttaatgagttaaatagatatttttaaccagagactcctatataaattagtgtattttctgcacccccaaaagacacaaaccaagagtaaaggtgttggaatcagggcctagaatttgaacccttggaagagctttgccttccaggggcatgggctatagctaaggtgaacctcagtttcctcaactatggaatgggggaaaacataagctactttacatgggtttcgggaaggttaaaaacaccgagtgtgtgaggctgggccagaacggtgctttgcagacagctgctagaaggttctagagctgcaagctccacgcctggccctgacagcttcctccaaatgggtgtgaccggcccacttctccacccttcctcaggctgtcttctcagctctcctgagctctaccagggaaggggtctgagatgcagaggccgggtgccagctgctcaaggactgtgctgccggtctccctgtgtccccacaagcagggcgtgccccagcaggtagaacataaagaggaggcaaactaggcccactctgatgaggtctcacatctgtgtgacctagagtaagtcacgtcccctcttgcacctcagtttcctcctcttaaaatgtcatgacaaggcacctgctgtggggctggtgtggggacagtgcaagaagggagggggagcaccagctcagactcctcctgtcccacaagcaacacgctgcagtgcctcccaggcccacggccagcccccttctcccatcatgctccggagagaaggcaccttctggaaccgtcctctagaacgatggcagatgccgcaggaatgagacttggtgctggtctatgagccgagaagggccaggcctagagaggaggggagcaccaggcctccctgaacaccgttcccagcaccttggcagcagcaccgggtggggagaggcaaacagctcaccatgaggcctgaagagctgcctctgggcccagctctgctcagcactagttgaggggcctcggaaagctggtgcccaggtcagcaaggcaggcttcctggggtctaatgtgtgcaaggctgcagaatgggctgcctggggacacagaatgaatcagatgtcacaggccctaaggagcccacagaatcatgggaaagacaggcaggtagcagacaaaaaccacatggtgacagcgccagggcagaggtgacggcaccgggggtgaggtgacggtgccggggcagaggtgacagcgtgggggcagagggctgcagacaggaatgtggctcacagaagacagacctcacagcccagcccaggggtcggtgagggtgccccagaaagttcctggaaaaggtgacaccagaatccagctcagtccagctgactcaaaagtccccttttctctccctgcatcttccctcactgcctctgagctcccgcctctgagctcgaagcccggcaagaagaatcacgttcctccggcagccgccacagctgttcagtccacccagcagccctgtgctccgcgaggcaggcggtgggcggccaggggcaggctgtgatgtcaaacagggagaattatgtctgctgggagaggcggcagaacagagatgaagcctcgagctgggcctgtttccatgccaatggccttccccgtggagacacggcgatgagaagccaaaaacagtcaccgtcgctgctcagaacccctcaagctgtcaggaaatgggggagaaattgctcagcttgggagagcagactgtctagcaggagggagggtaagaagtccctcaggcaagagcaggcccaggaaaaggaccccggggcccctgaggaggacattaaaggacaggacagtgaatccagagttcagaggctcctctgggcccagttttacttccctaaattcagatctcacagctctccttccaggtagataggaagctgagactctgaaatactaacttttccagttgtacagccaataagtagcagggctagaacctgaatccaggtctgttttcaaagctttccctcctaaactctgctagttagcctcaaaaaaagaaaggaaaggaaaggaaaaaggaaaggaaaggaagaaaaacagtagctgtgagctccaagggttgctatcctaaaaaactcccagaaggtgccaaagacagacagaaggtgtggtttcagaatcctgcacccaaggagttcctataaatcacccaacgtgcttgcagagcagggtctggaaaacgatgctgctagctccttgaggacagacatggccgggcaccgagttgatgccagcagggccattgatgtcacaggaaacccgcatgctccttgctgccaccagtatgtgtacggcaaagctgccagcacctgggcccgactcttagcagcttcccccaggtcctgttgtgggtcagcttcaatcccagggttgcctgtaaagtcctgcagtggacagtctgttttagactgccttagaacatctgtatcagtcaattgaggggaagggactgcaaaaggaagagaaaaaatgcaagacagccttcagtccggagaagctcccatcactcccagctccctgcccgccttccctgtggcagaaggtgcgtgtcatcctctcttactggagatgagaatgggggcaggggtagcaaataacttgctcgaggtcacaaagctgatctgaaattcacattccttccatttctaaatcaccacaactactcagcattcataacttttttttttttttgagaccgtctcgctctgtcacccaggctggagtgcagtggtgtgatctcagctcactgcaacttctgcctcccgggttcaagcgattctcccacctcagcttcccaagtggctgggattacagacttgcgccaccacacctggctgcctaatttttgtatttttagcagagacagggtttcaccatgttggccaggctggtctagaactcctgacctcaaatgatccgcccagcttaacctcccaaagtgctgattacaggcgtgagccacagcgcccggcaagcactcactaacattcaacagtcaatccacagatatttcctgacaggagggactgtgctacctacggactcgtggtgggaaggtggggtgagcagtggctccggggatcaccagcaggggaacacacacacagagggcaaggaggctgcgtgtgcaaacacgggtggctcttgtgctcatcacctgactcttaggagctcactgactcttcacagtcaccttgagacctgacgtagaagccgaggcccagcgaggttaaggaacctgcatgagggacacgggcagtgagtgacggagccaggctggggaccgggcgggtggattcccgagcctggataaaactggcttaaccactggagaaactggcaagaacggctgtgtttggcagatgctatggttgggaagcacagagtgggtgggagaaccgcagggcaccagagggcagccttggtgactggggaagcttctggaaggggtggtgtggaggcctggaaggccagacttgatagatgagagggggtgatcaggcaaagcggggcctgggtgaactggattttcagagcaaggttcagaggaaagccaagggcaaggggatagtgggtaccttccggtgaaagcagctgggccagccagatgctggtgaggctttggggaaaggaggaaaggctggtcaatctgtccccagaacgttccttgccagcccaccaggtgcagatttagagcaatgctgggtgtgttgcagcactgggagagctttgagtccctggcttgtggggctgggagagacgcaagggggctgcccccatctcagtatggagatgggccacaggggccgacccagaggggacagaggagaggtggagcccagagagtcccctcccaccccactgctcctcagagaacatcccacggctcctgagtgttctctgggacccaactgcaggtctgggacttgctacaaagaataagacggagcctcctacagagggtcatttcatttttacataatattcacatcttaaaatggaagggcatctgtcatgacctctgcaatgccaagcgacccttcctgtgcttcgtggataaggacactgtcttgggtccgccaactcctgccaggaacagtgacttcccacctccttccatcagctgcttggaaccaaactcacggcccgccctcactgcacatgcaggcacagtctcagcttcatttctgtctccatttaataaccatcttcttctttttctccttttgctccagatgatatgcatttaagtgtatattatcttgcatttttgatgaatccttgtgagccatttaagtcctatcttcagtaaggaagaacataaactaaacacacacacacacacacacacacacacacacaccagccactgctttctgagcacccccagggtgctgcaggctgggcctggtgctctgtgcaggtcagccccatcagccccatgccttgcaggggccgctggagcaggttcacagcgccccatctggagttaagtcaatgaggttagagaggccaagacaccagttcagtggacatggctggggatagcaggttcaggctgcaaatctcatatatttccacatgccatgcagcagtggagggcacagctgtgtctctttttgaggacagaatcttagaatgctacttatggcagttacatctcaggagttcctttttccttgaaaactgagaagttgatagactaccgagaggatgaactagtggcaaaggagcaggatgagtctgcgattcagtgctgctccaggcagccagacccatggatcgtcctcacggccctcaatcgagcagccgcagcgtgccctcctggtctcctgccccacaggcctggcttctcgttcattaaccccttacccgtggatgcgtcccggcagcaggcgccacgtggctggtgagaagggcgaggcttgggcccatggctgctgctcaccgcacagccttctctttagaaggtttttcctttgcaagggtcctaatgatttctgcttcctccactgctggggaccactcagccatgagctgctcactcctctatgggatggatggtgaaatagaggcaacttaggtaaagactttcgggaatacctccaggctatgggaacagacagagccatatacaacatgacctgcactcttgggtcagggagagacttgcttactcatgtcttacaaagccataccgagatccccaaagacaaataggaggatcacaaaaatgtgctgaattaatccacttcagttccacaatttattcttaagctaccgtgtgtaccagtatatgctaagtaattgggcatacactgtttatacatgagtgtagggcttactatcctgatttcatggatgagaaaagagaggctcaaagacttcaggtcatttgcccttggctagttagtgactgacctcggggctttctgactccaaagagtattcttaacagcttcctgcatgcatgccctgtctctaggtgctgggccctgtgcagtgatgaaatgatgtgatccctccctcaggggtggagagtctgattaggagctgtgaggataagagaaaaagacaggcctggcatggtagctcatgcctgtaatcccagtgctttgggaggccaaggcaggccgatcacttgaagtcaggagtttgagaccagcctggccaacatggtgaaactccatctctactaaaaatacaaaaattagccaggcatggtggtgtgtgcctacaatcacagctactcaggaggctggggcaggagaattgcttgaacccaggaggcagaggttgcagtgagctgagatcacgccactgccctctagtctgggcaatagagcaaggctctgtctcaaaaaaaaaaagaaagaaaaaaatagtaacacagtcagtggtgtgctggtatatgtttaacaactggctattgtgggggtaacctgacttttaatatttgccaatttctagggtgtaaatacttcctgcctggctgatttctagttaccaatgtgatgttaactggcttatgaaattcctgacaatgtgagctgtccaagtggagtgaacagtcttgctcctccgtcgcctggcaaagcccttccccattctatgagaaccaggtcaaatggcaatacctagggaaaactttccttgtcctcttcagacacaatttgtcacactcttttctgtgacctcttagtcccttgtacacatcttaaccacaagattgattctctagtacaggggtccccaaccccctggccacagactggtaccggtctatgtcccgttaggaaccaggctggagagcaggaggtgagcggcgggtgaagcttcatctgtatttgcagccaccccacatcgtttgtattcctgcctgagctctacctcctgtcagatcagcagtggcattaaattctcacagaagcacaaaccctattatgaactgcacatgtgatggatctaggctgcgtgctccttatgagaatctaatgccttatgatctgtcactgtctcccatcatccccagatgggaccatctagtctagctgcaggaaaacaggctcaaggctcccactgatactacattatggtgagttatataattatttcattatatattacagtgtaataatagtagaaataaagtgcacgataaatgtaacaggcttgaatcatcctgaaagcatcccccaccactgtccatggaaaaatggccttccaagaaaccagtccctgatgccaaaaaggttggggaccacctgctctagcatttatcatcattccttggaagcccctgggacagggacaatctcatcagtgcacagaggcggcatatggaagacagtagtatttcagagacaactatagataaattccactgatgagcacagggcaaaaattctaaatgaagcattagcaaatcaaacccagcagtgcatcgaaagaatcatccaccagcaccaagtatgattaatccaaggagagctcacaccaagaaatctaccatccaggccgggcgcagtggctcacatctgtaatcccaatactttgggaagccgagatgggtggatcatgaggtcaggagatcaagaccatcctggctaacacagtgaaaccccatctctactaaaaatacaaaaaattagccgggcatggtggcgtgcgcctatagtcccagctacttgggaggctgaggcaggagaatcaccccgggaggcagaggttgcagtgagccaagattgtgccactgcactccagcctgggcgacagagtaagactctgtctcaaaaaaaaaaaaaaaaaaaaaaaagagaaaactaccgtccaaaaccattacaacactgaaaagggaaaagaagttacaagtatgctgataaatgccaaaagacatttttttaatttcagatttcagaaaagaaaactcttaaaatggagagagaaaaaaaattatcttatttatttattttttatttttgtgagatggagtcttactttgccacccaggctggagtgcggtggcaccatctcggcttactgcagcctctgcctcttgggttcaagcaattctcctgcctcagcctccagagtagctgcgactacaggcatgcaccaccatgcctggctattttttgtatttttagtagagacggggttccaccatgttggtcaggctggactcgaactcctgacctcaagtatccacctgccttggcctcccaaagtgctgggattacaggcatgagccaccacacctggccaaatttataagaactatttcattaaaaaacaaatattccacatatacacatttttatgtatttccaaatagaatgctaactttaaactggataatatgttcttaaagttcaaatggacaaataactacaaaagccataaagaaatgtgagaaagaacttgctttatcgggtattaaaacatatcttaaagccattacgacaaaagggcatggcattagcacagcagtctttacagtagaacagataattcagaaatagatccgcatttacaaaagaactaaatatattacaaaggtggcatgctaattcaaggaaaaattgatggtttttaaaatcaactggtcctggcataacaaagtaaaacaaaacaaggatctatcttattgtatatgcacaaatgaattccagatgttttaaattttaaaaataataagagagtatgtgtgtatatatatgttttatatatatagacattcctaagaagatatactggattgcagaaaaatgaacaaattttatgtggcaaaagccatgaaaacaaagtcaaaagaaatataacagaccaggaaatgtatctgcagcaccaggaaatgtatctgcagtaggcagtcttttcctactccaggtcacaatctcctacaaatggataagaaaaagccacacaattctatagaagaggcagagaacgtgaacagggcatctaaggagagaaatccacatgatcaaagaaacacatgagcaaagcccagcctctggagcagccagcgaaaagcaagtgaaagcagcaacaatgtgtttcattcggtggatggcaaatggcaaaatatgaagtccctgaatgtgcacagtgctgagaagggcgaggcccaggggctgctctcccaggctggggccacgtggatgctgcagcctggtacttggagagtatgctgtggcacaggtcaaaatgtcagcatgcgggtctcagaggaatctaagaatagcaggaccccgcttctgtaaaacaaacccatttcctgtatgttaatacatctccatatgcatcaatgtgagcctggagaaatgtggaaaaggtcctaccccagggtccagaccgggcttctccgaaggatgggaatggaggtggcagagaagattaacactttctatactgctttgcattatttcaatagttaaaataagcagagattactcttacagcttaaaaaatgtaatcaatgtttttaaagtgctttctcgactacaaaccagcacccatggtgaggctccatgacggtccagccaccactgcgcacgggacccgtgagcttgttaaggcttctgagtagagaccaacagattcgtgtgccataatagcctggtaaataggaatcaaaaaggtagcagctggagttctccccatggagctcgacggagagaaaatgaatcgtagtgccatgctcggctattggctgggcctaaattgttccttactctgagaattcgttaagtggctgagcaataaagaagagagatttgagagttctttctcggcacaatggctttgacccctgccctttcagtcgtgatggctttattagggaccgtggggtgctgcaaacagccttgaggctctgggcagaccagttcatccagctcaattaaaaacccattacctggcgctgagctgggccagctgtgggccaggccgtgggggaggagaggtgacttcctcagtcccttcctcaatcctgtattagcatctactccaggccaaacaccagcacccaggaagcagacctggaagacggcatgacccactccaaagtggctcccaggttactggggtcagtgacatatgaggagatgatctccacagccttctaaggcatggcctcccatttgtaaaatgaaagggttgcccaggtgctcatgtgctccgagagaacaatgccaggtaccagctacatagggcaaggagaccccgccccaggctcctggggagctcaggtgaggacaccgacactggcaatccgggcctgtgtattgacaccctattgtgcggttgaaaagagcacacccaggggccagacctcaagcaggtgctagagatggcctccctcaaggagaggagtctgacctgagagccaagagccgtaggatggcgggggggggctgccttgcctccatgggaaggacagcagaggggctgccatctgccagaggcctgctgagtgcatgcgtcctctcagacacgctgcctgccgctgacacatggagtcttcagacaccaggaccatggctgggtagggtggcagtagtgtaaacatgagcaaagccttgttcctgcctgccacagtcagttcaggcaactgtcacaatgtgtcaccactgtggcttaaacaacagacattgatttctcacagttctggaggctacaagtccaagaccaaggtgccaggagggtggatgtctgctgagggccctcccctggctggcagtccgctaacctgctgctgtgagctcaagatggcctttcctcaggtgtgtgcagctctctggcgcctcttcctacagggacagtaatttgattgactcaggccccatcctcatcccccatttaagcttagttgccttctcagaggtctcatttccacatacaaccacactgggggttacggctgcaacacataattttggggggacacattcagttcggaccagtacccttcccagtgcccagtcaccccagaggcgcgaggtgggaggagctttgattgtcacaggaaggcagtgcttgagctggaccaggtgcccagcggtctgatgtggagaaagagtgtgattttaagtgggggaagcaggtggggaccgagagttgacatccaggctaaggggctcaagcaagcagaggcttggtgcccgaatgcagagtgggttcacaggaaagagaagagaccaaggtgcccagggtgtgggtggttgaggagcctgaaaacatgccacaaagagcttgaaatgccacgccaaggacttcagatgtctcctgcaaccatcagagactctggcagggtcacagtgacccacccagaccagcagatgcccctgtttatccctggacttgggcctgtgctccaggagctgccatgcccaggaagagggatgcacgggggtctctcccaggtggaaacagagacctataaaaagccttgtctgctgacggacagtgttcctgggaagccctgcagcagaggtgccagtctttccaggtatggggctgacgctgagctctgaacatccctggggcctgcagaggcaactgcgctgccacaaagagaggcctgatgggcatcctcaggataataaaacgtgaacagctggggtctcgcggccacatgatggtgttcaagcccacacctgctccctccaggccctctcacccacccttggcacagaaggtcttggagagagagttgaaaggtgctggactgactgctgagaatttgttagacatgcccgtgaggatccggataaaaatacccaggtcttctattacaggagcaggcagcagtttacatggggctctcacgtgtatcagttcaccccattttcactcagagccaaaaacttatgggagggaggtgatgtcttccccattttacaagggagaaagcagactcaaagaatttgaccattaaagaaagtggtcaggtcttggccacaaggttttctgggtcttggaactagccctgagcggtgtgtgtacagatcacgtaatttcggcagcccagtttcctcatctgcaaaacggatgaggtgaggaagtcgccgggtcactgtgacgatgccaagcgtgcttcctgtgcagagcttcgggggcctgcagggacatccagcaccacagcactgtcattaacatcagtcaccacgtggctaaggccttggagctgccagggccacaggagaggcagtggagcacgtcgggcggtggaggaaacccacgtctgagcagggcgactttccaaaggatgctccatgggaacacccgttttaagggatttaatggactttacctttatatttatatttatgttattttattattttattttatcttttggcgacagattctcgctctttcacccaggctggagtgcagtggtgtgatcttggctcactgcaacctccacctcccaggttcaagcgactcttgagcatcggcctctggagtagctgggactataggcaagtaccactacgcccagctaattttttgtattttttaatagagatgtggttttgccatgttggcaaggctggtctcaaactcctgagctcaggcaattcacccacctcggcctcccaaagtgctaggattataggtgtgagccactgtgcctagctgactttacctttgtaaaaggttccatgctgtaaggaggctgggcccggttgggtgtgatgggattcacagatttctttactcaaggcctccagggttttctgtgtgctctcgtgagtcccctgcagggaggtggacgtgaccagggaagcccttcttccccctcacagagcgccaaaaggacctctcattccacagagaacactcaggggtggggttgctggagtgggggtcacagatgacccgggccctggacgtgggacgtgggctgcgggactacaggattacagaggggtctgagaaggtcttactgaggcatggggtggcctcaaggcagagctagagcccaacagggcagcccacgcagggtgggcagagaaacggctcctgtctttcagggaactagccactcctctgggacctgcagccacactgggtcccactctttcccgccgaatggaggagaggagaagcacaggtcctggtgcaggcggcactggcatcctgtgaggatgaaggcctgtccatcccatggctgtgcaggataaggaatgacgggctgtgggcccaggaagtgcttcccgggcgccggatggatgggcaccagggccaggtgggggctgcatgggtcccatgcccaacctcagacctcaggatctgaatctccactcagagaatctctgcccttaatccctttgggatcaattaatgttcccaagaaaaatggaaatttaatttccatagtaagttctgagaaaaaagtcacttccacccgggggaaatttcatggctctggtttgtttgctttgggccagggcttctgcaggacacagccagtgatcagacgccccgtggaggataccgccgagcagccagcttgcccggaaggaaaaagggaggcaattccgaagagcagacgagcctccgagacaacagccgtgagacgatggccggagctgagtgtcaacgcccaaggatttccagggcttcctcacccatgggttcctgaatcagaatatttcctgtgcaaagcgccatgccaggctctggtggggagaggtgagcatcggatataacccgcccgtggaacaggccatgatgaggatgtgcaacagcaggggagctccagggcccctgtcctctcccaggtgggggtgagagcccattctgcctggtgggcaaggaagaggagcgtggagaggtcttcctggccaggtctgaagtaggggagggcacagagagcccagggtgacccaacctggagcctcgttggttctcccagtctttctaggcccagaggggcaggctgtgagaggggagtggagggagaggctaaaagccagactctgggggcctggaatcaataaacagggagtccactgggctgtggtccttggagaggtgtgactgatcggaggggcgcttccagaggactacactgcaggtgaaaagaggagggacggaacaggagagtgagagacagtgtgggccagacaagacaaggcagggcttctcagcagatgggggctgcaggagccggccgggtgagcctgggcaagccatgctcagccctggccagctggggctgtggcctccttcccccgcagggtcggtgcctggggggaacagagacccctgtgagtggcaccaaataaacgcacaactgaatgaagagggtgggaaccacggcagaggcggtggagtggggcagcaggaggggatagcggagaccttgccaggccacatgggcagggctcggcgatggacaggaaagggcagaggagtgtgaggctgtcagcctggcccggggctctggctcgtgtgaaaggctggagttgacgccgttcctgtggactggggacgccgggggaaaagcaaggttggaagggaaggaaaataactccattctggagatacactgaactgtgaacagaaaggtacagcaggagagcctgggtttctgcagagaggttggtacaggtccctgtgggagccatcagtacagagagcaaggcacagaagccggagacacaccatggggagggagaaccagttagaagcccggagagaatggaacatacatgtctttagggaatatacgtgtgatcaaagaagggacagactgcttgccggtccatcttccggaacctggagtcactctgcagtagctcccaatgcaggagctaacacagaacatagccatcaggtggaaacccttgcaggacacctctcacacctgtttgcccatttctaaaatggggaagggaaggcacttgccccacagctgttgcagaatggtgagctagagcccgggaagcgcctacagcaggtctcggcctggagcagggcctcgcggctcagggtagtggctccctgtgcctgaggaggacaggcaccttggtttcttcaccatctcagtatccgcagggccgaggcatgtgtctggcacatgctagacgtcattgctagtggccctgcatgcaggacagaggaaggctgagccatggctgatccccgtaatccctttggaagggattctgaagcttcttgcagcttctgaagacaccacggcaagctgggaaccccctgatggggactccgggagcagggtagcagcatttagacggggctaagggagatggccacagagaccgcgttggcttccccgggagctgggatgcaagcacaaagaggaggtcaggcagtctcacctttcaacccaggcctgccatgtgctggggtggtgccaataaggactgcgtgcccgcacgtgactgataagtgaatggaggctctgagaagccaggtgtcctggcaaagccagccaggacagcagcaagagggaggagctcggtgccaggctgttcttgcattgctatcaaggaacacctagggcagggtggtttacaaaggaaagaggcttcatcggctcacagtgctgcaggctgtacagggagcatggtactggcatctgctcagcttctggggagacgtcaaggagcttttactcatggcagaaggcaaagtgggagcaggcgtgtcacacagtgagagcaaaagtgggaacaaggcagggagaggtgccacgctctttccaacaaccaaatcttacgtgaactcactcatcactgagggaaaggtgctaagccacacgtgaggaatccacccccacgatccaaacacctcccaccaggccccaccaccaacagtgggaattccattttagcatgagacttggaggggacacacacacacacatcccaactacagcaagcttccccgatgggtctggctgcagggctgtgttcccctcactccacacctctccccagcatgttgcccagtgtgcccacatgacgcctgtctgctgagggtcacactgtacctggtacacagaggtcctcagtttgtattggcttgtcctgaactggcgtgaggacagaataccctctactctgcaagggtggctgctttcctcctagcattctcttttatgatctatttggcatctctggtccccaggagctaatctaggaaaccacactacatgtttcctcaaaataagccagacaatgcggccaaaggcacaccaaaggttgtcaattgaagataaccgctcacattttctaccaagtggttcaaagaccaagctccattgagaaaagtcattaccaaatcgggaaatgctcctttgaaggaacatcctgagatttcccggcatggggctgggcgatgcaattaatatttgttgcttgagttccccagggtgtctgacactgggctgtaacattcattaagggccaggcctacaaggtcatcgacacatcattttgtttccctgaagctgatcaccagcgagcaacttgaaggaacgctgcccaggtctgtctggctccagagacggcaccctaggactatgccagcaggccctctgtcccccagagcccaacgtctgaatctcagcatgaaaccaatgaataagagatgagcaatatttatacaaatacatgcaatccgagggagggctcacccaatgaaatgacagattcatttgaataaaatcagctaaagatacccaactattctatatttgtaagatcaaaacttagaaaagaaattcttctttccttccatatatgttctctgcttaaaaattcctacatttggagacgcagaatggaggaagaaaaaaaatgcccgcagatcaacatggcaagcttctctttccttgttcctgtacaaatcttcgtctatatttagagagtttcttttctgactgtaacatacatatgtgtactagactaatgtgtgagaatgtgtaaatgtacggagacgcccttccggagggtataaagtctttgctctctcttcgctctacgaaccaatcccatcactgctttggtgcgtgcaccactttttaaagccatcgtctcctttacttctcacaatcactgtgcagacaaacaggaggaagcagacgatagggatgtcaaatattcgcccaagctcacagcctccaaagcagtagtctctgtcttagctgcagccttgtgacccgttcccgttccaccacctgacatgggtctcccacacgtgctataatgggagagctctgcctcaatgctcatctgcacgcaaacacacgagtgcaatctactaacacacagtcccaggaggagcaacgtctggatacccccatctggagatgctcacaaccctggttctcaccaagagccttgggatgggcgctgtgggagagaatcaacacgaactcctgcactctgggagggagggcccttccagctcacacagtttgcggggctatgatcccaaatattgtaacacaagagcgaaaagaatggatcctgagagacaggtaagggacgaaaaatgcagaaagaatggacatctgctccttactgtctctagcgatgctacacacatgagctaggctttcccactttctaaaccaggagactgtggctcacagaggtcaatggctggccaaggtcacacgcctagtgagtgacagcgctggggctggaatccagccacatgtgtgtccacagaccacgcacttcccaggtcctggtaccatagaactctcctctctacatgcatgggtaggggtggcaaggagaagagtgacatggaaggagagagagaagatgaatgactgtgaacacaaatactccattagcataagctgaagttagctggaaacagaaatgcacctacagagctatctagaaacaggacgatggtctgtggcctgctagcacgcaagcaagggaaggagcctgacgtgcacgtgcacacacatgtatacaaacacatacacacacatgcatacacacacaaatgagcatacacatgcacacacacactacacatgcacacacatgcatacacacacaaatgagcatacacatgcacacacactacacatgcacacacatgcatacacacaagtgaatatacacacgcaattacacatgcatacacgctacacatacacacacatgcatacacatgcaaatgagcatacacctgcaaatgagcatatgcacgcaaatacacatgcacacaaacgctacacacatacacataaacacatgcgtacacagatacaaataaggatgcacacatacacacatgaatacatatacacacatgcacacacaaacgagcaagcacatgcaaatacacatgcacacacatacacatgcacacaccacacgcatacaccacacgcatacacacacatgcatacacagatacaatacagacatacacatacgaatacacatgcacacacatacacatgcatatacacatgcacacatgcaaatacacacacacacagacacacacctctagaaggggctgtgttagccaatgccaaacaccagcctcggctgctgcaccagggagcccggaagcctctctggatcccaggcccacactgtgaagagcaaggctgctggtgaccacgaacagagggtcccgcccaggacacctgctctccagggaggctgaactgtcagggttattgaacagtgatgaagtgcacggcagcaagctccatcgctggccgcgctgactgacatttaccctgcacacagcctgtgccgaatgctcacgtgcacttggcaatcacagcgaccttgggaagcgggagcacttgccccatttcagaaatgagccatctgctaagagacaggaaggagctccctgtgggcactcagtgggcaaacaggagagagggctgggaattgaacccagggcacgcaggctccacaagttcacactctaagcttcttgttgtaggttccaaggacacatctggggcagaagacagccgcccacacattagttggacttgtgtggtctgctgtgtcgtgtgtgtctgacagactctgaggaggatctgcttgtgccgagacctgggtttccggggtggagaaggtgggcaagagactctcccagccatcagtgaggtttcttgatatttgatcctaacaggggctacaggaagagacccacaatttatacacacactcttcccacgcactcacatgcatgcaagcacgcacactaacacacacacgctcagtcacacacaggcatgcataaacacacacaaatcacctcaatttaactgagaaattaattacatttgctccctataaggaactggcatagacctggactcctacccaagctccccaccccgctgggtgccccacagcctgtgggaacacccccaccgccgcagcctgtgccagcctctccatccagtcatccaccccacccctcactgagccccactggatggggggtcaggtatcatgtgagaggaggctcctttgctttgcaaagcaacttgccgcagtgaaagtgttactctcctcaatttagagaggggaatggaggcccagggggatggacgtgctcggagtgtctcggcctgcagtagggagagcggaaggctgcccaggcctctgcctccgtgctctttccacagtgcttccgcccactccgtcacgttgccttgagtagccccattgtcctggctacgtttcagagtgcctattactcaattatcccttctcctctccgtgaagtgtccattaaccttgtgtctccaggttcctgcttcccctcccaaggtgctcatagcgagcacctacctttcatgttgtcacaggcgtcccctgccagtaaccagctctgagagggtgagggcaggggccacctctgagggcctcgttcgagctcacaagcttcccttgggaaggctctcccggccctgccagactcatcagatcaagtctgataccctgtgagtgcactttctaatcaatgagcaaaacggcctctttcttccttggccttccagtaaaaatagctacatttgcatgataacatctgaggaccacccagctcagagactgcttttaatactcgaaatctgacaaggcacgtacaccatgcagacagaatgcgcggggtgttcgcgtggagcagctagtgagacctgccgctcctgccagaagcccagccgctggttggtctgggacgagcaggtatggcccgaagcaggggaggctggtgggggtgggagaccagtgggcacggagttgggagagggcccagcaggaggaccatgccatttccccagcctccccaggactcagctttgccaccttgaactcagcgagctctttgccaagggcaggtgtcatattctggggaaaggtaaataaaggtccgccagagtgagcacagaggccttccctctgcttgtggggctctaagcctggctgacttctcttccgcctcatgagcctgcccagaagagcctcctgcaggaagcagccttgacctccaaggtggatgacgtgtcccttcctgtggggagctccaagatgacccccggagaccctcgcccttggatagcgtcctccccatgagggtgtgggaacttgggaatgttatggcttccatgattacggcattctctgctaaaagggagattccttgagtgggcctaatctaacaggctgagctctttaaaggcagagaaatttttccagctgatctcagaaggggaagtcagagatgagaagcatgagaagggttcaacaccccactgcaggtttgagatggaggggccacgtgtccaggaatgggggtggcctctgggagctgacagcagtctccagcggacatcagcaggaagctggggcctcggtcctacagccacaaggacctgaattctgccaacaataagaacaagcttagaagtagatttttctccattccctgatgagaacccagtctgacaaaacaccctgattttagccttgtgatcctggagcagagaaccttcataaaacctatagcccccttcccccagccgacttccccttccttagctttaagattctgctaaaaggggcagcaattctgcttcagtttctccagagaatgtccctcctacctgctgggccagcagtgttcccaggcaggctgctgcctgtgtcctgcctttcccacacaggcccaccctctctggctgatgacccagcttcttctgctctggcaatggaaggagctggtcacgaagaatccggccacggcacctggctgacttcagaggttggcagggcaaatgccccgcagattaaagaagtcatttccttactcgaagcggaggcttgccctaaacgcaggccttgacgggtggttcacaggcagggcactgtgctgccccttcccagacgtggccttcccagcagaacaggcaggaaagaggcatttccagaagcagctgcggccaccaaagaagggccgctgctaatgtgcagtgtggactttctcatgaggagagctgagaggtgtgcccgtcattggactgactgatttcagcttccttccgcttcaggagcaggaggggccgggaatgaacttgagtgtgggggaggggaggcagggccaccctggtgttattcctgggtatggctactgaaagtcaggagggatcagaaacatgagagcccctggtgaggaggtgccttggcggtggaggaaacgcaggctttcctgtggcatgacctgtgtgcaaatcgctacccaacccctaccagccacgtggctttggtaaccatgtgacactgggcaagtcatggagccctgtgtgggcctctggaacgaagcagggtgagaaactccggtgcatagagttgttgtaagcctgaggtgaggttctgtgtacccagcgcccaccagagcctgtcacagtgggagctgagtcacaagggactctgcttgctggtggtgtggttagtgccacctgctaggcttggccaggcaagaacgtcagtcaaggttaggtattcttgcatgatggtgcctacaccagctggcagcagaaacctgacgcaactccatagctgcaaatggagatccagggaaggctccacggaccatagagggctgtgtcgggagcagtgagtctgacattcctaatgacctaggacaatgacgtgtgtgttcaccacgtgacatgcacaactgagagacagagctggctttctgaggaaggggggcgggcacagctgcaaggcacgggggacccctccaccgccagcaggcaggcggaacgtggcgtctggcgaatggcagggaagccgccctccatgacgctgagtcctcaggaccagtgcactagtggggacgttgtcgccccatctcacagctgagggagttgaagccagagagtgtggcttatccatggtctaccaggagtacaggcagagtagcctgaacttggagtcctgcctggcaggctgcaaagctcttggtatttccatccctccttgccatgtccaagttcacgagagggatctcacacccgagagatacaggcactgtcatcatcaggcgcatttcaggatgtaaaccgcagctcagaaaacaagtcatttgccccagtagcggggctgttgctgggagccagctctcccaggttctgagtccaatgttttccccaccaccccgtggcagtcattaaataggcgatttctatcccacctgttgaggatttatttcatgccggtgctgactcgcctggacagggaagcccagatgccaaaggtgaagatttcaaaggtgaaagtgccccccatggagtgggcatcagactcgttggcaggtttctgttgactgggttttcgctgttaatgaatgcgaccttgggtgaatcacctctcctcttggagccttggactagagcactggtttttaaataggggagttggaggcaataggggtgaaagcaccctcaaatcctcccccatctgaccagctcctctgacctcctcacccacttcgagcagaacagagatgctttttatgtgttttacatactgcgttgtgcacacattgcctttgattaataaatttctgaagtcactgagccaaggaacctggcaggtcctccggggctccgctgctctgcgactctgcagcaagcatcctcgccgccgtccagccttccctcctgcgccccattgtgtcactgtgatggcgcgcacgttcgcccgtgctgtgcgtggatgcacggatggatgtctaatatctattcatctaggtatctatttttgtatccacgagacatcctcactaataaacctggggacagtggggaaagcagcaagaaaggccaatcagtgctgctgctgtaaagcgatcaagtcccaaaggacagcagacaagagacactgctgccaaatctgctttctttaattaaggcggagattgataagagctgtcagagtgaaatgaagagactccaggcctcactgctttgccaagacatgagagggaaagctgaagattaaaaaacaaaaaaaaaaaaagcttccctagaaagcccacagaatccgttacaaaaaggatgaggctccgaggacggcagagagtgcaagaatcaccaccccaatcagcagtggaggatgtggcctgagcttgccagctgtttggacaggttatatatatctatatctacctacccatctatctatcataaatgctattttccaccaaggaaagctgggtgtagcacaaagggaagcatttatttatttatttattttttttgagacagagtctcactccgtcgcccaggctggagcgcagtggtaccatttcagcgcagcgcagcctccacttcccaggttcaggtgattctccctcctcagcctcctgagtagctggaattacaggcacccaccgccacacctggctaatttttatatttttagtagagacggggtttcatcacgttggccaagctggtctcgaattcctgacctcaggtgatccacccaccttggcctcccaaagtgctgggttacaggcgtgagccaccacaccccagtaaagggaagcagttctgaaagaagaaccagctctccatctcagaccccggagcgggaccgatcctggttctgaccctgcgcccggcactcgatgtgtgtgtttcctgcaattctccccaggggcaagtgcatgggaagccgctggggggacctggaggagaaagagcttccatgagcaagctcaaggttcgggagggaggtagggcccagcccaggcctgcatgaagcccaactgctcccctgcagcaatgcagatgctgccgccacacggggcaactgagggagactgaaaactcacacgattcatcccaagtccaaaaagaactgaagagagatgggcgtggcttcccgagagtcatttgggacattctgtggaattcccaggagcagacaccaaggctccacaaaatctcagcatgcatgcaattagtcatgggaagaaacagtgctctttcaggaggatgcttctaattggagatacttcattctgtaagctaaaaaataggatctttataaaccctcgatgtttgccatcattgccagaaacaatgagatacgatggtaccccatcacctccagggaggtcagaaaggcttgatgtgaacggctccttctgtctctgtgggtttgtcgttgttgttgttaaaaaaggaaatgacaaggaggacttggggcctagcgatctgggttcaagtcctgcttgcttgtgagacctggaacaaggaacaggacctgtacaggtgacagttaggttttaatagtctatgcaccggtggtgttagttcagggaacaaaccaggaagtgaacagagaaaccctcggtaaacttcaaagctcaagataatacatctgcaaagcctagaaaggctggactacggttcttaccatcaccgtgacacacatgcaagagccctcctgctgccgctgttcacgccagctgggggacgtgcttcactctgtgacaccctgtcgaggcagcacggtaaccagaggcaccacccccagtgcacagctgccacggggcagggtcttccggctcccacctgacagcccaccacagcccccaacggcacttcaaaaaggcccctgtcctcccatagccatctgtccaaggcaaagctagcaactggatgggaccaaagaggaactctgaggggtacttcttgccatggcaggaactcaacaacacgctcccccaccagccccctgaaggctcacgtgcccagggagggccttgcctgcactgcctcggtctgctctcactgggtggcctcgcagagacccatggagtgggactggccccctgaaggcaggcctgtctccagcccaaggcgtttctgagctgctgagtcctagctctgtccacgcacatctttggcacacccacgtggctgtcccctgccatttccccacacccctggtctctcgtccttccaggcacccaacccagatgccaggagcccctcggccctcctctgtgctccccgcttctcacttgccaccgagattctccttccagagtccatccagtcggcccatgtctgtctgtccacagggctggcatggcagttcaggccagcaggagctcctggcccggtggctacactgtcttctcacagctcgcccatctctaaccatgttgtcccctcttctggcccaggctgcaggctccttccacactgcacatctgatcacaccacccaaagccttcgacgcccctgcttccaggacagagtctaaagggctcgctgcacccacaggcctccacaccaggactcttctctctctttgtggaattctcccagttccccacagccacagccccaaacccctggatgcaccgctctccatccgtgacttgcctcttcttgtgactggatagctcttcctcatcctgcaggtctcagctgaaacatctcctcctccaggaggcttcccctgccccctgtgctgggcacacgcacctgcctttacctgttctcccacttggcacacatcgctgaagtgtgacatccttatggcttttcttccctgctggactgcaagctctgggggcacaggagtcacatctgtcatgcttaccatcagaacccgaaacacgaacaagcaaacatgaataacttaggccatgacctctggggcatgtggggtggcaccaggactgagcggggagtgagcctgggccatggaagggccctttctggtgtgggccattttcatgggctgctcggagccccccaaggaagagaatgtgggagcctctgaaccaccctggcgggtctccttggccgcagagttagtccactttccttcagggccaggcctctccaggaagaggctgctgctgtgatgacgggtgggtggcaaggttaccgaggaggcctgccagcctctgggaggaggaggagcagcctcatggaacactcttgaccgcatcaaaggtatttttctggctgcctctgacagacaggctctctaaatgaggcctgatgtccagggcttgcctaggaacttatacatcggttttcttcctcctgctgctctcccgtccagccctgctgtggagaggcccagggcctcacctggatgttaccaggagtgtagctgaggatccaggtcagctgatgtgcagcaagagggacacaccagggggcaaaatccacatggccacgctgggaggggtggaattctcccttttcacaagggaaggccctatttagaagatgcatctcctgaataacgccagacggtatcctagggtggctcagcccctgcctctccctcagggtgcatctttggccagataaccctcccaggtctgactgctgggcctagcactgtgcttgtccgggacgtggcacaggcctgggcccaggcactcgctacttcacacattcagcaaatgctgagcacctgccacgctagacactatgctcagcaccagggacattctcaggggatgtgagcatcatggacatgccatcatggagaccactctggaatgagacaccgggggctgggcagtgaatgcagcagaacgggatccaggtggaggggtcctatgcagccccagggcagggatggctttcgacaagccaagtccatgctgtgggaggggacagacaggccaccaggtagtgaggggctgacaggccgtctctgcggggatgcggacagtggggaagaaatggcgggctcaagaaaggttctcaggggagtagacagtagggtcaatgattttggcctctgtgaagggactcagcagagaggagactgatccctcctcattagtcatgttcggaacccacagtaactgctccccgaaagcggatgctcatggcgcattccttcttcccactgcttgtttcctaggggcgcctactcatccttcaggtcacagctgaaatgccgctgcctccagctctgctgggtgctgcctccaagttcaaagaatgttccagggtgagcaaacggaccatccaaagggagagtgggcatggcctattccggagacagaaagtgccagccggtgccaggcactgggacagcgacacaaacaaatggcctctcccttccggatgcctgctttcacggcagttttctacgttgtagccaacagacttcactttctgagactgtgttccaaagaaaccctggctattaacaatgactttatttctgtagtgagagccacagagggtagttattttccaccaaaagcacagtaaatgaaatgttcggccagtctgggcaccaccagagagtctgtactaaattcccctggactgtgcagtccatcccacggcctggcagagcaggcccaggagatgtgaaccacacaaagcagaccttattactgccacgcctctcctcagagagggctctgctgtgacactgtggctgcggcggccctggcctcccctgcagggaggtggcttgcaatggccactcctctcagatgctgaggaacagctgaggagcggggaaacttctgccgctttcatgtcccctcactcattcatttttcactggttccagtagaattgattctaatctcctatggatcaggagtgatcctggattcggggaatgtgagttgattccattgagactcaaatgcttaaatcttcatggcaaaggcaccatgtgaacggggcctggaaggaggcaaaggaactaacttagcagcggtggacgttgatgaggaaactgcacgactcaaattggaggtcggcgagggtagcgtgttcctggagaacagaccagaaacgcagcctgaccctaaaccctagtgggccttcaacacaccaacggggattctgcactggacagtcgggccaggagggtggcggtttccacgcgtgggaggtttctcagcaatgcagtggcacagtccacactctcacagtctttactggccttgcccattctcggatgtgtcaatcaacaggcacatccagcctgccccgcccacagcccagggtcgctcaccaaggcctggctgcctctggtaggcttgtccttcccttgtgcccatgaacagagttttctgctactttctatggctgcctcactctgacattcctgtagccagcccttctagggtgcttggaagggtaggatctgatgcctcgggtctgggaggtacaaagggatatgttagtttcctattgctgtggtttgaagcaagacaaattcactgtcttgaaattctagagctagaagtatgaaagcggcctcgcctggttaaaatcaggatgctggcaggaccgcattcctcctggaagctccagggaaacatctacccctcgcttgccttttcctgctgagggatttcccacatcccctcgcccccggctccttcttgtggtccttctcacatcgcatcactccgccctcctcttctgcctccctcttctcctctgaaaggaccttcgtgattaccctgggcttgaaggtcagctgcttagtaactacctgcacctgcaaccctaattgccttttgccatgtaaggtaccatatttgcaggttctggggttgggttgtggacatcttgggggctcttgcttgctctgcctagcacatgggggcacaggagcctgctggtgggggccggcgggcctcactgctgcgctgtttcttccctgtctcccccagcgtgcctgcttgtctggcagaagcagctgacccctgaagtcaggcagcacggaaatgactgtgctcatggtcaacacacctgccgagtgcaggctctggccaatccatcccagggcaaggctggccaggtagggagggtggtgctgctgacagcctcctctgtccctggtgtggtcacaggcacctcatggatgcaggagctcctggtgcaggcagaattcgcagaacccacagtgctcacagtagggagccgatgggaggcacccccatgctgggccctgcccactcacgaggagctcactggctggtgggggacccagccccctaaagcaccccaaggccaagtgacagagttccaggacgaagccaccacccactggggagcagccccagctgcctgcacaacacagggaacttctgaaagacaagccacaggacaatgtccaggtttactagacagggcaggagggaagctggggacctggggtggagaggactgagcaagtgaagaccggggacatgggagagcccagaccgctttggaaaacacagcagtgtgagtccagctgaaaggggctttgaaatgaggaaagagaactcagcagaggccggtccatgaggcccttgcattagaaactaggaactctgcactggacttttggccactggtcagagctgtgcttttaaaacactgtcctggcatcaacctggccaatttgcagcctctcttttgacagctgcagggagagttaatttcactgcctcttgaaatgttgctgctgctggccttggggatttttctcctcctccacctgctttttaaacagtctaggcccagagcttcccacctgtggaaacttgctctagaatttccactgctgtccagctctttgtcctgaggagaaggcttccagccaggcctccgcactccacattcaaagtgaacagcaagagtttctaagggaaaaaacaaaccctacttctaactcttgtcaaagcagatactggcttcgatcgcacagacatcccccactgacaccagcttcacagcagccctgacaaataaacacagtcggcaggcgattcatcacatttgtaaattgaatcaacatccgctctcgccttcgtgcccggggccatgatcacagcatggcccccgcctgagaaggctggactcccatggaggaggggctggcagggggtggggagggggcgggcctgtggcacagagaagtgtccctccaccgccctgtcctgctgtttgctgtcctgcccatagacgggctcagggtgctggccattgtgcttctgggagggcatcctggtcagctggtgggtcctccgagttctgcacttacagtcactaatgtagcagctgcactgccaggtcctacaaccgggtttcatttcatgtcacccctctaatcttaagcagattttcatcgcacagatgaggaagctgaggtccgggcaggtgaaggaacagtacgtggcaggctgggcataccttgccagatgcttccagccaacctggcctgccccagccactgcccagccccaggcctggtggtccagatagaggcagctgaagggcggggactgggctgtcttgtttgttggtttataccttatgtgcaataccatgcctggcatatggtgggcactcgacacatagggctaagtggaagaacacgtggcatgctgtaggcatttgggcatctgctgaataaacagtcatgtgaggtaaacaaggcagagaccactggcctcgttttatgcacagataaactgaggctcagaaaagtgaattcccagagccagcaggagggcggcagggctgagactcggccccggggctggtcactggctcactgctctctgggacttccaggtgcctgcagaaccacaagggagaagccttgaaatgcccacttgtgcatcaagtgaacttggactcctctgaatttctgtcattcatagcaggtgtgataggcagaacgatccctcccaaagatcctgacccacggaaccggtggactggtgttcttccacggccaaaggggaattaagctcacttggagacaggaagctcatcctgaattatccaggtgagccccacgtaatcaccagggtccttaaaagtgaaagagagaggtagaaacgtcagaaccagggagggggcatcaagagaaaggctggaccagccactgctggctttggtggaaggggccgggagccaaggagagcaggtggcctctggaaaccagaaaaggcaaggaatggatcctcctcaagggcctccagaaggaatgagccccgtgacacctcaattttagcccaggagccccacttctgactctgccctctggcactgcatgagaataaatctgtgttgctttaagccaccatgtgcacgctgattcaccagagcagcctccagccactgctgcagctgatgagctgcggactccagcgctgggccctcactccccatacagtgctctctagctattccttggcaacctgagtgtggcatatctcgtcctgtcctccccactcagctctgggtctccagaaggcatgggctgtggacttctccaggcttcagcggcttcccagagacccatctgcaggcgagcaggtgactatgctcacccgccagagtcatagagtggctttcatcaaggaaacctcctcatcgctaggaggacaaattcaaggacagctgtagactcccaactctgtccctgccctgctggtacagcgcctccccagcttcaccttcctatgtgaaacagggcaacctgagaccacacccggctgttgtgaaggtcatgtccatttcttggcagagtgcctggcaggagaagggggtcaaaccagggtggccccctgctttgtcctccccacatgaaataattgggctctaaacatgtcacaggatgagagagaaggatgaggcttttctatttcgtcaagacgttccttccctgctctttctgtgaacaacggaggggccgttaattttccagaaaggagagtatgcacagccctgtgcagggcgggcagtgggtgaggactgctctatggctgggctggtcctgtctggacacaaaccacagactctaaattttacaccttaaattaaggaagagaaaaggtggaagagaggcaggtaagagcaggagagcggggaggagctctgctggcatggactgctggtgggagtggggactggaataagctttgggacagtctggggaaaatagaattgtttttcattttgtggaaggaagggccacctcattcaccagctaagcaaggcctttctcctgctttctcagaaggtccaagttgcttacaaatgcgatgcctttgcccggggcccccagctggctgcggcaacctgctggccaggcttggcctgaaggcctcagccacccccatgctcccagttcatcaccccgtccccaggcctggcacatcccgtgtcagcagcttggtgtcccactgggccatcagtaccacatcctccacaccttcccatccgccccctctccagccctgcccggattcatcgtggtttcttgtgtgtcccagcactcaagcaacacggagctgagtttctccaatttgaggtagctaaggatgatgtcgcctttaaggagatactaggtttgacccttggtttaccatttactggttatatggttgtatgacttggaaaaattactttttctgggtctcaggaatgaggctaatgccaccaagcattgtagggtatggggagggggaaaggagctgcatggggtacagtggtggcccaggctggcagtcaatagaggcacaaactctcgcctgtgctccactgcattcctggcccaggcctttataaacatatacgggttccataaaagcgtacgacattaaaacgcactggagtgccagatggctaatagcttcctaatatccactttctccctccaaaagaatggaaccccaatatttagctgggcatattaatggagcccgtacttccaggcttcccttgcaattgggtatggcactatgactaagtctggccaagggatgaagggagagggtttgtgcaaattccaggaggtctccttacaccggggagggagtgccttcctcctttcctccatgctccccgcagtgtgggagcagctgtcctgactccaggctgtgccccagggcaacggcagaggtacagtgcaggtgcctggcactggtaggtcacatcagctttggcctgtctgcctctcgattttaatgtgacggagacctgtgagctttactgaagccactattactcgggggtttctgctacttgcagccaagtagaccctaacagacaagctgtggcctttggggccaggcaggatccttgttgtcaaagggtttccaggctggcagatgagaccggaaagccagcccatgggtcagagcggtggaggagacactctgaagagggagcaggaaggaccagagcaccagggaaggcttcagaggatgtggggactgggaagctccaaagggaaacatggaggaagaggtgggtgccgcaagctgaggccaaggccaagggggccggcctggccacgatgggccttgaacttcattctgtgaagaaacaccgctacaggctgcagggagaggaggcatggtcagacagctcggcttggtgccggaagcggtagaggctgtgtgaacagtcccagcaagaacagatgccggcctgcgctcatggctccccactgaacccgatgatcaatcatcaatcccagattgaactgagctcttagttccaccccccaccccccgcagcaggcagcactgcgggagggtggggatcaggataacacttgtctggcttggctgctgttttcctatccatggcccacgaccaggccccaccagttggcaccagcctgtgaaacgcagactcatctctccgaactgactgcctctggcaggacgaggtgaattatcctaaatcaaggggaggcagtgaatacattatctcaggaataagaagaaaaatgaagatggatatttacaaacaactcctaaagaaattcacccccacacacatataattttaatggtctctgaaagaaaaggcaactcttttgctgagctctagtcaatcagcatcagcaaacacgatgctagccgcattggaagctgactgatacattcaaaactctgacagacgcgaggccatcccggagttgggcatggaggaggcccattcccatcctccctcatccagtccctgctgtgctggggctgtgcccagcaggccacccaccatgctgtctgtggaggaggcccagggtgagcaggcgcaggtagtaggctaactgtacaggcaggctgtgcattcaagaccacagcaaatcaatccatttttttgatcatgcaaattgattatctaaatccattaacaagctcttgaagctatctggtccagtcaatcacactattcattccttcaatcatgcattcagtgatgacttattaagagatgactgtgtgccgagatctgggcttgcagccatccctgccctgcagggtccccagatgcagcaactgtgggtgcgcagcaggacaaagctctgacaacagggaaggaagaaggcgcaagaccataagaagcagatcagagggttcctggggagcaaatgcagcagccttctaaaactaagggcttttgccagcagagctgaatgctggctgatgggagacagcaaaaccaatagaggttttctgagcgggggaaacactcttccatccacacacccccggaactgtgaggtgaaaaacaaatggaaccaatttccatcctggctgagggatggaatcaatgcaattaattcagtcagaaggaaagacacgtgcaagcacagggggttccggagccagttcatcccactcctcacccaaatgcacaccacacttgcagaccaatgaggaaaccctgcaacagtcccgcctcggccgggtctggggatgggcacgagcacctgcctccctggaggcccggcctggggatgggcacgagcacctgtcccctggcggcgtggcctgcagatgggcacgagcacctgcctcccaggcgacccagcctgcggatgggcacgagcacctgccttcccgatggcctggcctggggatgggcatgagcacctgccttcccgacggcccggcctgtggatgggcatgagcacctgcccccctggtggcccagcctgcagatgggcacgagcacctgcctctccggcggcccagcctgcggatgggcacaagcacctgccttcctgacggcccggcctggggatgggtgtgagcacctgcctccctgacagctggtgaaggcaacagaagcttaaagaccctccaaggcaaaaagctcaccaccaccaaagcctccgctccctgccgcctctgcctgtgccctgtgtcagcagcagccctggggcacgtggggcctggacttggtctgccggaactggaacaaggcccctagcccctcacgcagggcctgtcccaggagctccatagcctctttccttggacaaatcacaccatctaaagggctttttccataagcattgtagggagaagggaagcaggtatggagggacaggcagatgacagcctaggtctagacaggactgcatgactgaagacaaatgtcccctgtccagccagccgccgcctcctgagcaccaagtgtgcatcacacgcgaggggcactttgctcactcctctgcaagcttccctgcaaacactgcagataaaatactattaactgaagcccatgttgcctctaaagatgacagaaaatagacgaaatacacacatgcatgagagacatgcacacatgcacacagatatccagtctagagtggcatatcacacggtgatagattgattgcctgcaatacacaacccagagaggaaaacttccagtgtttattaggaaaccaggacatgagatatggaataaacatatatgtgagatatatatatatatacacacacacacacatatatatatccaaaatctatgtgtgtgcatatagctcaagttggatcaccttctatatatagacatacaaatgtatagatacagctctccccatataaatatgcatgtgtgggtatatatatctcccagctcccgaaatagaagcctatatacttagatgaattacagtgtttaaaaagaaagactcaggagtggtgtgtgcccatgttcccaacaagcccttgttgtctttctcttccccgtaggcagccttcccttggctcagcgtttgcttcgccaactctagatgctgctgcttcacatactgaagcccctcagcaggtgtgctgtctagcctgaccgtgccatatgaggctagagacagatttgctcagaatgcagtgttttgcagacatccaaagttggatggaatcatcttgaaaagcttttgcctggtcaattcagaacactcaatgtgggtgacttcccggccccctgattctgcctgagagttactcaaggtgccaactggcccccaagtcaaacgagagtgctcagtgtccccttggactctggatgacaaatcaccagccatttctcaggcaaagccattcccaaattgcattgagccttcgtctaggatacctggagaaaagatctcccgagaactccaaaagcccacttagagggccacagccagaaacagagcaaatgggaggtgggtgatgtgggttgggccattaagacactgctctcttgacaccaggagaggttccctgttgacaccaagcatctccaatcatttgccactggggctgtccctgtgttctactcaggggccagcagcggccaaggccatgactctgggaaagtccgctgtgtgccagataccagaacagaaaccagaacaggtgtagctgctccctctcctctccttctggttctgcattttcattatgtaccttattctagccacaagaatgtcttaaggaaattatggaataactatacttttataatgtaaatgtattacattacaatattaaacagatcacatgttccaggttatagatcagagtacttcgtgtaatattcaataatgcgccatatggtgtgtggacactgttgtggtaacaccatcatgagtgtgaacgttttctgagcgtgtccacactaggaagtgtgctcagtgctctctgccctctgcctcactgaattcttgagttctaagatattaatgtcctcattttacagaggatgagatggtcaggaggtgaagccacttcttcacagtggagtctgtctgcccagagagccagctctgccagcatacctcacttcgccctggctcagaaccagtgtttccgacctgaaggaggccctgaggtggctcctgtccaggagagggcctggaatggtctgagggcctgaaagctcttatcctccttgtccaccagtgaccagacctcccaggggctctctgctctgcttctcggttcccgcatcagctcccaggaacacttgagcccaaccctgcatctctgtccaattgcttagaactctgagccccttctcagtgctcccctggggactagaccattatgaaattgctctgatatctgttttctcacctcatacatatgacaaatgggtatgagggactgagaagaggctcagaagaatgaagtagtaactagaatttttgaatgtctaccatgggctgatcacagtggtaattattttatgtgcatgacatcaattaatgcttaccctgcagatggctggttctcatgataagcaggggcagagccaacactagaacccagggctcctgactcgcagagttcagtgttctttccagatagcccaaagcaccagtgcccctcatggggcaggagctcttggtggctctcttgccattgcaatcccagcattgccttgtcctggggagaaactgagctacctgtgacaacactgtaatcagaagtcatcataattgttaaaggaagagcaaaatgctaatatacatgccaatgcatctgaaaaccactgggccatataattagccatttgtagggatataagtcacagaaggaaaacttttttctgtgtcaatgagttgaacaatcaagtcattcatccatccatctacaaatgcatatggccatctacccactcatcagtggtccacccatttatcctttcaccatccaattgtctactaatccagtcttcatcccttcacccaattatacactgacccatctgaccattgacccatctagctatcaactcatcttcccatatactcagcccccatccaccttcccaaaaatcacttaatgaagtcctaccacacaccaagaagcattcctgatatggcaggatcaagatgagtaagatatcctccatgctcaaaagaactctgtctaaaagagatcatcgtgtaaaaagaaaactgcagaagctctccatccacagattttcaccttaggaactttcacaagcatcagtaatggagaaaatgcacatcagctcagctcccaagcagcagatgatgtcatgggttccttacacactgttactgtcagagcctaacctgtcagtgaatagaggaacttctgtataacaatgtgatcagacagcgatatgaaccactgcagagaggtatgaacaacgtacaatgggagccgaggagagcagtatatcagggtcagggaacagcatactttcttgaacttgaccggattcaaacctaagtcaatgtccttccagaacacacactctccccgtgtcaccatgctactttcaactggaattcaggagctcagacccacagcaactcaaaagatagatgctgaccacagatgtcaccaactgctcctccatcttgactccgggagctgtatgcgagtgacaacaggatggtggttagacggtggtgcatcccggaaggcatgggaccgggcctgctttccacctggtacctatttcaaacggggatgaacggtcaaatcatccatcagagcaggtccctgaactctggtctccagaggaagcagagcaagtgggatagcactaacacgagaacacagcctgggaatcctggagagtgccggaaaaccgaacccaacgttcaaaagggaaatgagtcgggaaggggaaaggtcccgcggactcacggcaaatgtttacatttgatgatctttggaacatatgcatggctgcatacagtacttgctgttaacattatagagaagcctgagctggcaccagcaggagatctccaaagtcattcagtcacgcacagtctccccgaaggatctgggtgggctctgtgaggggcaggtggagaaggacactggatttggtgaacggactggctgtgcatcccacagatgctcctggagggtctgccaggggaatgaaggacgtctctgatatggtttggctgtgtccccacccaaatctcatcttgaattcccatgtgctgtgggagagtccccgtgggaggtaattgaatcatgggggcaggtctttcctgcgctgttctcgtgatagtgagtacgtctcatgagatctgatgattataaggagctttcctacataagctctttctttgcctgctgccttccacagatgatgagacttgctcctccttgccttccaccacaattgtgaggcctccccaaccacgtggaactgtgagtccaattaaacctctttctttttaaagacatgcccagtctcaggtatgtctttatcagcagcatgaaaatggactaatacagtctctgagatctaacctctccctccttcacactccagaacactagtgtgcgcccatgttatttctggtaccggatcatgaattcatgggttgatgcccgccttccccactggacaggaggctcctcaccgagtgccagatacacagtgcgtgctctgacaatatctgttctcctccctggtcctggttctgccactgatgaacttccttcttgtgggcagtttccaaatgtataaaatgacagagaacagtcagactgatgatttctacctgggctcccaaaggcactaatggtgttaatggtaatgattctcaatatttcagacaatcagttggaaatcatgtgtttatcttccatcgggcagcacaaaccaaagaaaatattccattttctccctctgggctggcatggtctctgttctatgaggttacaccagctaccttgggctggctgggagctctggttggcagatgtgtgtttctgattgatgacatgaaaaggtaagttcatgatcctttattcaagaggatgggatatcatctttcaaaatatgggcagcccctggggagaggaaactgcaaacatagtctcttggaggtaggcagagcaaactggcatcttgagttctggcctgccccctgtctgatcatctgggtcagccgctgaccaagccatacgctgctgttcgtcattcgcaaaggttctttgtatcttctttcccgtgagtctaggcttcccaagaagtgttccgtggtgacgccaacacctggcattaaaccactcctgtcttgtcagcatggggacgctccatgctgaattctgtaaaggcctctggcccccaggccttccctgttccagatggttctggccagccttcccaagctcggctcctgtagcacatggcggtggcaggagcaatgtgcaggatgcttgcccttcgggagacacgacaaccagtttcccatttgcagtgtgggtcctcatgagaaaaggaggaggggaggccaagcgatcagaggcattttccaaatctcttctcctttttaggaaagagccagaaactgtatccccgcgcccatggtacctatgactcccccatcttattcaccaaagagactctgccccacaggtggaagggactgggaagaaagggacagaactctgttcatcctgaatcacctgcacctagcacaagtcaggtgttcaagaaatgcttgctgaccgaatgaacaaaggaaggaaataataaatgcaaggactaatgaatgaacaaacagggcttcagccaccacctcctgcagggtggggattcaggcctaagctctaaaaaaaacaggaggcctttgcatcagttcctcctgggccaatgatggctggacccaggaaggggctgggccaggggcaggctgggggcagtggactgctgagagcaacatgtgctcactctgagcacccagggtagagccgggacagaggcctctcaatggacaagggcctgagagccaaggtagggtatctttacaaaggaagcgaagggctcttattttagttttgggttttctaattatttgcaaataaatatgttaatattttatactacctacatatgtgtagttatcacatacatgtgtataccatacgtatataatactatattataccaaaatattatttaattttatggtttaattttgttttaatcctcagggcaaatggtctcactgaaagggtcatccaaacaaaacaataaaaccaggaaaattaacacatctgaccacgtttttgccttcaacattctacaggagaaaactcatcactctctatctgattatcggaccctgggagggatttgcgaggctttctgggttcagaaacctcaggaggtcgagttcttccacactctggaatgttttccaccccctacatgactctggaacatcagaactgaagtcatctcactttctttgagtcagaatcgataggggtggctggttccctggagcctcagctcacagacgctgccatgaatgacgcttttagtacaggaaagaggcaggagcccacgctggggcaggcctcactctgccacttgccagccacggaagctgggcactggccaggcccttggtgtccgtgtctgtgccctggggtcagggaggtgacacctggagcacccagcacaggacccagcacacagaacgccttcagtaagggcagcccatcagccacccagattcaaaccctggttcctccacttccagctatgtggctccacggaaggagcttaacctctctgagcctcggtgagatggtaagagtagcaggggccgtagctacactcggcatcacgcctgcacacgtaaaatcctagtaggtgctgctctcatcctctcctctctgctttctctttcctggtcaaatctcacagaagccttgcttgcagctaccctcagcagcatctgaggacttggcagtggcaggttctcaaataagctcaggaaagagggtgccaaacaggcactgaggccagcgctggtttccctacgacctgcctgggaagcacactggcctgctcatgccccctaaaatcacccaacctggctacccccttcctggcttgaagcgagggctgatggggtaccgagccttggcatgggctggctccttcccttcctatcaatcgtcttcattcaaagctggcacggtctcctgaggcagatgcgtcaatgattaaaccattatttgttcatgtctctgagaggcgggagacgctgcctcctccacaaacatccctggaagccaatcgggcctacctggtctccttgtaacccagagctgggctgcagatcaaaagacaagtaaataaaataggcccaaagattctgcatctagactatcaaaccaaaataggtatgggaagtgaagaggcagcagctaaatatttgttttcctcggtaatcaggtgagcaggcctgggctttccagacctcctgtttagaatcccacgctgctcccacgcagccctagggtcagtgcagtgcctggcgctcagctccaggccctagcaggcaggggtaccttgccatgtcacttccttctctgaacttcagattcaataccttcaaatgacaacggcatcatcaacatggcaggtccacgtggagacccgagaggataaaaagaaattcccaggcagctcaccacagctgtgcaagtgcttacacgacgcgtcatctcggctccgctcctgaccttctagataagattccctggaaggtgagggagtgggaagtcccctgtttacgctcttcaggggagtcttatgcggtcagcccaggccctggcgcctctctctgggaacctctaatgaaaagccctaccaaggtgggaggatgtccaggagcggcatgtggggcatgtcctgtcttctgccgcaagcccgctcgaccccagcacctcagggccgcccttgtgaagaggccacttgatgcgtggtttataaagctcataagactggcaattgcttgaggcacgggccaagccatatgcctcttatttcatcagtaacaggaaacctgggtcccccacagaactagggggcagtgaggcctggtaaaaagcatttgcatgttgagacagatagaattgggttcaaattcttgatcttctctatctagtctgaccttgagcaagttccccaactccgagtcccagggccttcatcattaaaataaaaatgatgctctccagcttcacaggctgtgtgggagggtgaccgaggcaacgcacacagccagggacacggagcacagactgagccagtgcactgagtttctttccctctgtgccgtgctctcagccagggcccctcagatgtggggatttggaggagaggcctgtggagtgggggtggaggggcacacaggcactggaggggctgcaggttggggactgaatttcagcatacctcttccagcctttggccacctctccctgcaaccacctcagggtcaaggccaaccctctccggggattttttcctgaagccatctctgctccccagaaagcaagacctcagacagccctgcggcggctccccttcctctactgccctccccctctgggaccgggaggccaggagacttggccttgggaagcgaacccaccagctccccgctgcagcctgagtctagcaggagagaggtgtgggacaatgtcctctcagcttcccctgagctcatgggtaacacaggtcaacagcaaagcagctggacagcggcggggggtggcgtgcaaaatggatttgtgaatgttctcaagagcaacggcattagctgcactgtgagcactaactccctttgtaaataggacaggcttgctttcactgttaatttcctcccatgtcaaaaaccagcacctgcaaaaaaaaaaaaaaaacccaagtgttgaaggaaggggaggggatggaggaaaagtacaggcaaaaccagtgaggtggaaggagaacgtgctcattcattcaaacattcatctacccacccattcattctaatgttgtctgtcatgtttcattcaagtattctctaagctgctgctgtgaacctgacgctgctgagcacagggacacagagatgactcgggcacacacctctgctcccgggagcactgaggtctgagagaggaagcagggtgataaggagcaacgggacagtcgggacgccctgggaatctgggcggggggagctggttcagacagaggtgaaagagcagaaaggtgcccagggcactccaggcagaaggaaagcatgtgtgaaggcaggggagtgtgagagtccatggtttccagcaagtgcacagggatcagcacagcagaggagggagcggtggagcgccaggaggtgaggccagaggctggcggcggctcatgggcctggtatcgcaggacacacgcaggagtctggtttgtatcttgaggataaagagtgctaatgaacatttgcaggggaaggcctgtcccatggaggcaaggcgaggcatagcaatatttccagtgtgctcgctgacaatctgagtgcgattctccccacatcccaacagcaacccaaggcgacagtccccattttatctccacttgacagctggggaagccgagggtcacacaataaacacatggggcaacgtggaccccagtccaggcctgctgacaccaagtccaaggcccgttcactctcacggctgccactggccgaggaaggcatggtggccacagagcagcctcacaacagccggagcagccacaggagctccgtatggtgccctctgagagtcaggagctgagcatggggccgtctgaccacctctgcctcctccctgcctgggcggcccgctgcttgtaaagcaacttgctcaccaggaagcacgaggctgggtgccctgggctgcctgccaacagctgcacacagccagcagcaggtggagagagcaactagccccaaaaaaggtgcaatggacccaggtggcctggccagggaccctgctgccttcagctgttattgacaggtcaccgaagaggcagttgtccccatctctagcacttgtctcccaaccatcgagccatcagctcaacatcagggccttcccagttgtccactgtggataaacatctggcagtagaaaggaagagaaaggaggcttcaccatctgggagaactgcttccaaaaaggctactcgaaggaacctgctcagaagtgggaccaaagcatcatggcaaataagatgtgactggggctttgccttgaaaaatgaaatctaaaaacattatgaaaacaagtttattaggggtcatacataataaaattcaggttccctttgccataaggactaactctttaaacaacaacaacaacaaagaaagagtcaagttttggctgctttttcctgtacttttctgacaaacgtgtgtgacagcacagcatggggtgcttcctttgcacctgacttccgcgatcataaggagggttgtgcatctttgcgtgatgcttgccgtgcctccccggggcctccgcccagctgctgagacccaggccagctcctctgccgggctcctccacggctcagggtgggactccagccgcatgcagctcttccatgccatttttatcaatctagagaaacatgcatctttcccaagatttttagttgactttgcaactgactcacatcttctctgcactccactgtcaggtgtgtatacataggggacagccaggaaggccccagtagatctggggactgggtgggtgggagatcagtgctagaggggacaggacacaggtgaggggccccctccccaagagtctgctcgtccatgagtgtctacacctgcaacacagccggcacctgcaggaacttaactgctcaatgataatgctctgtgccttcaagcagcaccaacggttttgccgaggccagagccgacaagtagccactgcgaccgggactgtgaatccggggggggcacagtctgcacaccctccccacccgctctaaacctgtccctttaaacacgcctcgcataagtcccatctctcagtcttggctcctcctacggtctccatctagaagccgtctcctctgcttctgcacggtgaaattgggccccgagtttcagatatctctgagatgtcacgtcttcatgggttctccctcctttcccacagcagacgctgccctttcagcactccctgtcctctatgctctaggagtggcgtggaggccaagctgagggattttgtttctccagggttactcctccagccccccggtttctggcccgagtcagagtccaggaggagtcaccgctgtgcaccgagctgcctgcgtctgatgccacgtgcccctgtgtggccgtgtgacctgaggggtctctccgttcctggactcctggctcgcagcacccaggagcttttaggccggctcctttcctgatcaccaagcccagcctgcgcttccatttttggatgcagcaatcactaccgctcactgtcctaatgacccccagagacatttagttaaggcagcgcttctattgcttactaagcaaagctgaatttctgcataataaagttcacgcttccagaaatagcagaggcatctggatggtaacatgtcacagcttcagaaagaaggaaaattcatgcttctccctgatgacatcatgacactttctccattccaaaaaagagaatgaccagtggctgctctgctccccaaccggagacactcagcctacacacacagaatgggtcctgatgtcagatctgccccatgcggccagacggccagagagaagctggggacatataacagttcagccaggccctggcacccagaggatgttgggtgccaagaagagaggcacgtctttgggaagagctgcagtatgttctggccatcgtcaagggagctctgtggccagcaacctgggttgggggacagcaggcagtaccctgaaggaaccacgataggagagggaagggacctgctctgctaattctttaattaaaacaagtccagcccctctggggccacagaccccttgggaatatgatgaaaactatggaccctattcccagaaaaaggaactcacagtcataaaatgggtacaactttatacgctttggggatgactcacacctcgactcttggttcaaacacttgctcactgcaatgtgagctttgtgagaacaggtcatcttttatctctgcagctccagtatcagcacagtgtcagcacatccagtagccggacagatgtttgtggagtgaataaacagttgaataaatgatcctcccaaaccacccatggctgtcagtgagccttaaccaagcacatgcactctagaaaaaagcccacatcatcttcaaaaggtagagctagcccactgaagaccagccgggtatgaccccacacatgctgaggctctcagaacccagtccaaaaggggctgttacacggctccaaggggtggaggtcgggaacaacctcagggagccactggccactcctgtgcaagaccttctgctgccatcataattctgtgctacatgcatgatcatttggtgaatgaatggctgtttccgggatagtcacccccaatgccaggatctaggcctctgctgtgtgtcacaggatccccggcccccagctcaaagaggctctgacagtcctcatgcatgctcaggtaatccaacaaaccaggcctggagctcaaggctgtctgaagcccaaacctggctctttccacacttccttcagcacttccccccagctcatccctcctgcaccccagttcctggcccagagctgggtccatggtctatggtcagcaaacaagtgctaaccgagtaaatccctcactaagcacagaccaatgcctgtcgccgtccgtgggccctcacatggagggcagcctctctcccaggttcctcgggcccagtggcagattcctgctgaggggcctcccagccctgcacacctccaggctgtaagctctgcaccctcaccttcaccacctggaaatagctgctccttaccaggctacagtcaacaaacactacagcctggagagcctgggagctgtggctgccggtggagcaggcgtctcacaggctggcgcctaccggctttctggcactttcccacagcagcccttctatattttctgtcaggcggcatatgctggcgggaagaactgggttccgtttgtgcttgttagaaatgcttgttccctgctgccgcaaagaaatagcactcgaacataaatgtaattttctcagcaaggcaatttttactttctgcagaaagggtgctccttgcagattaacaatggtgagagcacacctggacaggggaggggaacgagttcttattcctgatgcaggtagcctctactgctgtgtcattcccctattggctagggttggactgcacagtctaagctaattccgattggctactttaaagagagccggggtatgagccagagtggtggggtgagtagtctggtgggaaggacacttaggaacaggtaactaaaggtgacttaggtcagagcaggtgaccaggatgagtcaggatggattgggtgaccaggggaacagatgtgaactactgactaggactgttgggaaagttgtttactgaaactagaagcaagggggcgaagagaaccaggaagttaaactttaaaatggagaatcaaagaataagagagctgaacatactgacgtattgattctttgaaaagaaacttggggttcacttatatttaacatgctctgcacttttccttctgcccattctaggccactggagaggggatgtgctctggggtgctatggagcccacaaatcgagtggttttgaacagaccccctgagtctccaagccttggtctccacatgggaaaacgtgaagacgcactgtctcccctgcctgccatgatccagtgctgcatcactccatcccccacaaaagcaggggtcttcaccgagagcctggggcctcccaggtagaccaagggtgaaatggtcacctccctggaaaggggaaagatgaaactttgtgtccacgtgtttttatcattccattctccaaagagccttggacacagatcagcgaagcactacttgcctgtctgaatgcaagaccatcaggtgcctttgctaggcagatacaatgtgtacattacctgatttcatctctctgaagccatacacattgggactctggtccattttacagattcagaaacaggttctgtaaggtcatggtcactgagcaaaaacggctctgctgggagacaccgccagggcacttggccccagggcctcagctcttcctggcctgtgttgcttcacaaaagggctgctgcctgtgtttgccctgccccaccaggtctctgccttttccaccatcaatggggacttgtgagcttgtttctagagaaggggcttgtcctctgggaacactgatgtctcagagagcaaaggttactcagccgtgttcttccagctgttgggctggcccagccatccagtgacggagcaccagccttgggccttggggagaggatgtcagcaagagctgcctgggaaaggtcaggggctgtctttgaagttgcctcatcaggctcaaggtcagcttcaaaggggcccagaggcggggacgcctgtaaggatcacttcctctgttgattcccaaggagaaggagtgatttcccccaaacctcttagtaccaaggcctaaactgacctacgtgtgctaccagacctctcttccttcctgggacattaagtgtcttaatctcactctccatgaagcacctgctctgtgcatactcagcaagtcctgggcaagtcctaagtaagccacagaaagggaggggaagcacggtgaggccaggggctccccagggtcacagcgccctggtccggccccacatgcaccagggcactgcattccccctgggtgccgtgtccttcccacagcctaggtcattgtacagacatgtgtgctccgtgtggcgccacctttcgatccggtgggtggcccttgggagcctctctaaatctcctggcatgtggcagaggcacagggatgcacagcccctcctctgccaggaagctccagcacctacacagaggggagggctctgaggccaggctctgctcccatctcaggagacagttcccagactactgacaaaagctcatttggcgtgtcttctccgggagaaaacaccacaggaattggctgcattttatgcaaagtggcagaagccaggaaggctacggactttgcagcccctctcagctctcgctcaggtgggtcctagcatggtgcctgatgcactaaccccacaggcgcggtccctgtctccccaggactcagtgagcaggcctgagccccaggaagcccaggacttgcagagacggaaagggccaaaggacagagacctgcccgctgcccagctgcagcacagggaggaggcacggagggcccaaagaaggggtgcgcctggcccctacatgctctccaggctgccggggagcacctctttcccctggcaggacactgcttcctctgctggggatgctgccccaggcctgtggtgaaatccagagcgtggaaccttgagcactgtaacaggtcaggctcgggacccgggacttgcggggtgaggccctttctactcgcagatggtgtgaggtgcagtactacccagcaggagcactgttgccccttgccaggcatggctcagcaggcgttccctgaaggggcctccacttcccatccagaatcgctgttcccgcctctgagaaaggctgagatgctcaacacgtcaacgtggggaaggcagggacaaccccgaacatcaccccactcatccccactggctgtgtctgcagccttggcttgaagctgcagctaaaaatagatctgccactgaggggcacgggaggggatatggagcgggcaaggagcagcattcacaccgggcaggctggaaaacagagtgcaggtctgaggctctagctgacatcacccaggatggccagaaagccccacagttcccagccaggactgggaccagagagcatcaaggtgctggggacagcaccgcccaccagtgggaccaatgcctccctgccctgctaagcacccaacattctggcccagctccatcaggccaccacaaagcccccctccctctcctgcagcccgaggctagttcaaggagccatttattcagctggcgcccaggactctttcctgtgctgtccttggatgaggcatccaagaaaaacaagagattccattcactggtacagtaagtcccagctgatccacgtccaaatagcccattcaattactcttatctctaccaacaacatatgttttctctttccacgtccgtccttcaatgtgagggtttggaaaggctgcaaaattcggggatataaaaattcctgcaagatgaaggcgccaggggttaaatttgtttttaatcttagaaggaaacaatggaaaactgtagaaagactgaaatctccatcacttatttttagcacgtcatatcttttgaaattcattttctcatttaagggatggaatacatctgggacactgtgacataggcctcgtcctgtggatggcaccaggcagatgctgattcaaacgtccactctgtgacttcctggctaggggactgcagagccctagcttccatctctgtaaatgacagtagcatacctgctccacaggcctgccgggagcaatggacagcgtctgtagagcagacagcagcatgccgaccgccagcaagccctgcagggctgtgggcactaccgcccttcccagggtcattgtcctgatcctagaggtgaagaagtctcagcaaaagaaaagcgcttggacccagactggctcatctgctgggaacaaaggtgtttaatgccagcagttattcacctgcaccgatgtggacacatcccagtcgaaagcatcctaagatgaggagaataaatatcaccaggtccaagggtgacgccatgagctccgcaggaaccatgtctgaacattgcccggaagctcacgtgaaactttggaactaagaatcccacagagacctgggcttgattcacatctgcactcattagcaccggttcaagccagcggtctacattctcttgattttgctgtgattaggtggcggcagaggaaaaactcaaggaggcccagcaaaagaagccatcatcacaactaaggctgtccccatggggtctgaagaaagcatttcagaaggctgctctcagggcaagagccacaggcatctctatagacagaggtggctctcccacagcagaaggaatcaggtcccatgtccatgcgttctggtctggcagaagacagactttctcctcaacacgcctgaggactccttgaggagacggactgtttctctctgattcattcattcacaaaacaagtatttgttgaaggcttactatagaccactcattcaacaagcatttactttgtacccactctgtgttgtgagttcatagagggggtgaaacagacacagatcatcaaaggggagtgagaaagagccacccctgggatgggagcagagagaggagaaagcaaaaggtatgtttgagaccaggccaccgttgacctaggccgggaagaatgagtaagagtgaatggcaaggaaagctatggagacacggcagggaagggaatgtcacaggaaaaggcagggacctaaggtcagaggccaccccttccctccccaaacaactcagcctgaagccatggggtcccaagagaacccagttggtccagggagggggaggaaggtatccgcacagcagagctgccccgtgtgtgagccacctgttgacccaaagagtcaaactctgtaaaatctttaaagagattgattctgagccaagtatgagtgaccatggctcgtgacacagccctcaggaggtcctgagaacatgtgcccgaggtggtcggggtgcagcttggttttatacattttagggaagcctgagacatcaatcaaatacatttaagaaatacatcggttcggtccaaaaaggcatgacaattccaaaggggtggggacatggggggccttccaggctataggtaaatgtaaacattttctggttgacaattggttgagtttggctaaagacctgggatcaaaggaatgtcaggttagcataagaggttgtggagaccaaagtcttatcatgctgatgaagcttttagctagcgggcttcagagacaacaggttgcaaaatgttccttatcagacctaaatgtgttgatgttaatgctggggaggtataatgaggaatattccacccccacgtcccatgatggcctgaacctgtctctcaggttcaattttaagagccctggctgaggaggaagtccattcagatggtcagggggccttagaactttatttttggttgatgcaccccgtgtgagataccagagcccatccagggtaggagggcatccacacagtggggaggcctggcctgggtgccagagcaggagtgagaggggaaggcaggaacctgtgggatctctgggctgggtccccttggtgacccgttgagagcctaggagtgtgggaagggctgggatggagatggcagattggttacatacaggaagaccgataagttacagattacagtaaagataatgaaagccgacctctccatgctgaggacatgaggtaccagtaaggaaaagggacaaaccataaggaactgtgcagtggtggattgggattagtggtgtcagtgtgggccagtgactgttaaggtggacagacagaaagagatgttgaggctgtgtgtgtgtgtgtgtctatttctattcatatgtatatgtctatttcccagctccatcctctgagaatgcttgggaacagcaacatcccaatatgaatgacaccccaccctgccaaagtatggatcttggttggtgtgggatcactgcaatctccacctctcagggtcaagtgattctcttgcctctgcctcctgagtagctgggattataagcacccaccaccacagctggctagtttttgtatttttagtagagatggggtttcaccatattggccaggctggtcttgaactctaacctcaagtgatccgcccgccttggcctcccaaaatgctgggattacaggcatgagccactgcacctggcctctaaatatcaattttcattagagggaatcaagactcctgtgagaaatgagtgatatcagggcttatgtttgagatgaacctggaatatcttgtgccagaaaataagtgtgtgctcaaagaataatgatgcagacaggtcaagagacacagaagacagcctgaaggagcacccagaggtcaaatcaggataatctgggtatcgaaataactaataatagcaatgaattttaacccaatgaataaaattgaaaatgatgaatccatacaaatataaataagcacatttaaaggtctgatgaagaatcggatatccatgatgaggaatcggatatccacacagtttcaaagcaccttcccgcaagatacttagtaacaacaaagagacaaggagtagctttacagtagagggaagcaaacaccatcttaatcaaatggtgaaataaccatcaccggcaatggtacaactagagattgtgggccacctgatagacacaaagagaaggactcagcctcacttttgtgacattcctgccaaaaatgttcaaaactgaatctaatcatgaggacacatcacatacaccaaaagtgagaacattctacagaatcgctgattggtaatatcttaaagtgtcaaggtgatggaagtcaaagaaagatggacgaactgttccaggctgaaggagactaaatgtatataacagctcaacgcagcaaatgattctgcatgagacccaaatcttaaatataaaggacactactgggatagctggaaaaactggaatgggatctcggcatgagatcatcatatatcaatattcatttcctgattttgatgactgtattgtggttatacaagagaatgtccttgttcgtaggaaatacacattaataatttggaggtgtttggggcatcagatcaaccacatattctaaaatggttcaggctgggagcagtggttcatgcctgtaatcccagcactttgggaggccgaggcaggtggatcgccagaggtcaggagttcaagaccagcctggcctacatggtgaaaccctgtttctactagagatacaaaaattagccaggtgtggtggtggacacctgtaatcccagctacttggaaagctgaggcagaattgcctgaacccaggaggcggaggctgcagtgagccaagattgcgccactgcactccagcctgggcaacagagcgagactccatctcaaaaataaataaataaataaaatgttcaggaaaagaaaattcttactaccatacttgcagcttttctgcaagtttgtgcatgatattatttcctttctttcctcttaaaggagcgtgctgcagtggaatacgtggttggaagtcagcagaccaaggcttgaaatccagatggaggccactagctcatcattatgattttgggaaatataaatatattgggaaaaacgtgaattttgaaaccacagtaactgtgttctggtccttgctttgcagactgaatgacaacctcacatacgctttgttctctcccctaaagcgtagtaataacactacctactctggagattgttgtaaagtctgtattattaacttcttcatcaaatatttattgcgcatgtaatagatgctctaaggacagttctaagctctgagaatacactgacaacaaatccgtcctgcatggagcttatattctaatgagggtagagagacaaacaagaaacaaatctgtgatatgactaaatatcagagtattataacaattgtgcagaaaaattaagcaactcagaccttggaaggaaggagtggtaggtcagacagaagatgtagaaggaaagtttaaaaagaaagaggaagaaaattatcacacagaacaaaaccaagaaaaagcagatcacaaaagtatatagaaaaattacaaacacaaaaagccaacagaatgtatgacataaccaagaccaaacatttataccacagcaatgcatataaatggcctaaactcacttatgaattaaaaagactttgaagttggatcagaaagcaaaactcaatgcttcatccaagagaaccacataaaaatgtgattctcaaaggtttaaattcaaatgataggcaaaagtataccagccaaacaaaaagaaggcaggggtgggtagttataatatcaaagagggatgaaataagggcaaaaaacatgaaaggagacagagaagggcatcttaaataataaaggggacagccaaaggacaacagttatgagcatctgtgtgccacaggccatcagcattcacactgcaggtatcatgggacacacacatgtcacatcaatacaagatcactcatggtgcaatggacccacatgagcattagttgtgattcacctctcaaaccccatggtagatcaaataagaaaggatcttaaagaactaccccgtatcattaataaagtagagctaattgatacattttcaactcaatacacttaaaacaaggaacataacttgtttaaaaatgtccatggcatagttacaaaaatcttagcacaaagaaaacttggtaaattgtaagtggtaaaaatagtattgaactgataataccattatattagaaagcaataacaaaagaagaaaacaaaacaaagtaattaccataggaagtttttttaaaaactatcttttaactctcgggacagaagtgaaatataaattaattgcagaatgcctaaaacatatcaaacattaaaacattaaattctagaacatggaaaagagtagaaacagggaccaccggaaaattcatatccttaaataactgtatttataataggaaattttaaatgaattaaatatgcaacccacaggtagatatttagaaaggcaaaaaggcattgagggaggactatctatagcagatattaaaatatactgtactgtaaagctagaacgactacaagggtggtgctcactcctgggtacacggacagaagagagtccaacaatttccctaaatatatgagaaaagtgattgggaaaagatagattattgattaaatgacttggggccaattaggtggctttttagaaaaacaaagggaggacccatgccgcactcaccttagtatattccagataaataaaaggtttgaatattaaagcaaatgagaccatgaacgtaccaggagaaaacatgggagaatgttttaaaaatgtaatccaaatgaagcaggtcttttaaagcatggttccaacacagaagatattttttaagagattgctccatttgaaaggaatatcatacagtgcgactcactctggtgaggaatgacatatttcacgaggatatttgttgccatcatgcttataacagcaaaacattagaaacaacctacgtccatcaaaaggtacagagtaaataaaggaggatgcatctgatgcataggttcaaaagaatgcaccagctccacaggatggagatggaaacatacccgagatctaccattaagtgaaaaaataaaaataaacaaacatggtagaacagctgtcacaggacaccattaaggaaaagaaatttacagactatgtctgcagacacaaccagaaatgggacaacagcagcccatggggagaggatcagggttaaggagaaggagacttgtacatcctttcttacctcctaaattctgaagtatgtttgtgcatattttttctttgcaacataaataaagcaaataaacacttagtgcactggcttgcaggggctaccatgcagtgggagaaaggctttccactgatattctgaggctttcccttggaagtggggagtggggcagtgctgggaggcgggccgtctctcttcgctcccacacttactcgctggtggtcatgaaatcagctttatgattttcaagttccctctctgtaaaacaagggtggttttatgtatctgatgaggttgtgtgaggactgtgtgacatgagtgaatttaaatgccagcaaagtccctgcagtagaggcttctcaataaaggtagttatgctgattacaagtgagagtccgccagctgagaggtgccttcgctctgtggctgagttttgttataacccggacacctgggcccaccttgggtaggcatagggcatgctatgttgagtccatttttattagctcttggcttattaggattaataacctgctacttgccactctatggagatttcagacttctttccttagcttgttttcagaacctgacagctgcactcacatcaccctttcctcagcacctgcaggcatttatactgtgtctctcatttcctgctggagggtctgccccagccccgcgagccagaaggcactaggagcacaccagttggcctaatgccacactgaggaggactattagaaccttatatttcctggaatctgaatcaaatgatgaaaggcatggccccatgtcccattcccccacaggaatagacgactgcagaaattacccttccaaaaaaagatgtctcttaaagaaagcagcaggcagctagaggaggaggagtaagagctgaggtaccccagaggcagcccccctgagtctagcacagactggcaccaaaggtgttcaatagcaatttgctggatgggtgaatatgtgggtgaatggacgaatatgtgggtgggtaggtgggtggatggactgatgagcggataggtgggtgaatggatcaatgggtaggtagatgaatgagttagtgggtggctggatgaatggatgggtgagtgggagcagacagatggtggtcagatgaatgagttgatggatgggtagataggctggtggataagctggtggatgggcttgtggataaatgagtgggctggtagatgggttggtgggtaaatggttggataagtggatggatggatggatgagtgggctggtagatgggttggtgggtaaatggttggatgagtggatggatggatggatggatgggtgggctggtggatgggctggtgggtaaatggttggatgagtggatggatggatgagtgggctggtagacgggttggtgagtaaatggttggatggatcagtgggccagtggatgggttggtgtgtaaatggttggatgagtggatggatggatggatggatggatgggcgggctggtagatgggttggtgggtaaatggttggatgagtggatggatagatgcgtaggctggtggatgggttgatgggtaaatggttggataagtgggtggatggatggatggatggatggatggatggatggatgggctggtggatgggttggtgggtagacggttgcataagtggatggacggatgggtgggctggtggatgggttgatgggtaaatggttggataagtgggtggatggatggatggatggatggacggatggatgggctggtggatgggttggtgggtagacggttgcataagtggatggacggatgggtgggctggtggacgggttgatgggtaaatggttggataagtggatggatggatgggtgggctggtggatgggttggtgggtagacagttggataagtggatggatggatgggtgggtggatggatggatgggtggatggatggatgggtgggtgggtgggtgggtggatggatggatggatggatggatggatggatgggtgggtggatgggtgggtgggtgggtggatggatggatggatggatggatggatggatgggtgggtgggtgggtgggtgggtgggtggatggatggatggatggatggatggatggatgggtgggttggtggatgggttggtgggtaaatggttggtttggtggataaatgagtgggctggtagatgggttggtgggtaaatggttggatgagtagatggatggatgggtgggtgggctggtagatgggttggtgggtaaatagttggatggatgagtgggttggtgggtagatggttggataggtgggtgggtaggtggcagggatggggaatggatgcttggaggataaaagtaagcgaatgaaagtctagaatagtgcttcaagaccagtcttgacgttactgctgatttgtctgggaacgctgggtcagtccatcagcatctcccagcctcattttcctcatggatagaaagaggatgccaacacattgatcactgataggtgatcatattattcatcataaaaggataacagtaataagtgaacactcacaagtgcatcagctggacccttcccagcatcctggtttgggcagaactgtccctttctccccagcaccttcccccacccctccatcaggctgtgagtgagtgccgggggtaagccaactgctccctgcacttgctctccctcagtgccatgccctgctcaggaggatccaggaagccaggcagagcacctcctctcatctgcctggacacagtcactgtttccaaggagctcacagtcttgggaagaggacagacaaatggccaagtaaatgggagggggtgtcatgcaggagcagacaagggtgatgaaggcctcctgcagtgagagttacttcaggtggaagcagccaggggctgggaggacaattcgttccacttggcttctgttctcggccatattcctgtcctttgtactggagttttctccagagacctggctcagaaagatgtagccctggctctaggatcagaacccctagtccacctctggcctccggaaacaaacaccagcccagccaccatggtgccacattctgtgctggctctggggttagtacctccctctcccaggactggagcgcacatcctctcaaactggctgctgccttgccgaggatccagactgacccacagtcaggccgttcttctcggcaggagcatgggtcagtcaaccaccctgaaggccaggctggccacaggcacgcacgctgcaccagtaaggctgctctgggaatggatccttgggaactgaccagggctgtcgtaaggcagatgccaggaatacgtgccttagagttataaatggaaaaatgaaacattaataagcgataataagggactgtctcagtgcatctgggcacatcaacatggaactatttaaatcatgtggaagaatgacatctacgcctaggctcaaatctggccttggaccgataggaggaggatggcctcattcactctttgatggagtcagcaaacccttactgagcacccgcaggtgctgaggatgctgctgcattctcaggcacccaccagcagcggaagacacagcccgcagacagtacaaccttaaggagaaagacaccatgctgggggtggggaaacgcgcaggcggaaatgcagctgggcccaggcgaggcacaaacgtgtggggccagggaggccaaggcaggctgcctacaagaacctgagttagaaggaaagggctggataagcctatgggaggcagcaggtatgaaggcctggggggagcatggctcacagggacaagcaactgcagctgaggaagcctggagcccaggtcacagggaagatagacaggcccagggaagggaggcaaggatgaagaaggcgctgtgggcagtggggggccttctgagccaaaggccaggcttgggagtccatcctcagggctctgtagccatgagaattctccaggtaggagaacaacaagcatggccacaggtggaagatcgccctgagcgccgtgggaaagacaagtcccacacgcgcataaccgggggcagggacagcagctatgggaccagtcacaaagcctctccacccaccggtttcttccaaaagcagacagtgcttaccccactggggcattgggaggaacagatgaggggacgctggaagttacgccttcctgaaaggcgcagtaggtgctccacaaacactttttcttttggggatcaagatcacaattaagcaggctcccaaatggtatttcaaacagagatgtctgcagctaaatagaagattgaggagtgaaggtagacaggacgggggaagaagagagaggagggagaggagagagacaaggcagcaggcagggtggggacaggccctgcatccaggctgcctgggttcagatgggatgaggtggccctggggctgccacattccaggtttcctttctcccgtccacatgagggatgtcgtagcaacctcctccagggttgccacagggacgcagaaaggagactgcgcctgaaacacagcagccatgtccacagatggaacactgggggcctgtgaacagaggcctctccaaatgggggattaggagctggggcttttcctctgaatataggttgttttcattttttttcccccttcaaaaagaaggtaactacttttgtaaagaaaaacaaacgatcctctttgtcaacccatgcccagggatgccaactgggccatgcgacagccttcgccccccacacccactgccgggcaagctgggcctcaggccagttgccacaagccgtcatggtccccaggaagtggctctcaactcaggccgaccaggctctcagagtcaccaaaaccacccaattcaccatcgtggtctccaggaagtggctctcagctcaggcagaccaggccctcagagtcaacaaaaccacccagttcacctgccccagtgggcggaggctcctccacaggcctcagaagtactgactaacactggcctggagcagatgtttggagatgtgggctgtgctggaaaaatccactgctggtgctgttgctaagctacctgggaaggaggcagagggccggtgggcaagcccagctgccagggtggcctggggcacccactgccaccatcggtgcggctgtcctactgtccggctagtgggagccggctttctcactcccttttccaggcagtctgagctctgaatgtattcagcaactcgtagcagccattctacatgaatttcatgttagaaataaacaaagctccccacatgatgtccatgttacacaatttgatgaaagggcacgttctcgctgtagggacatgtctctctgcaaagccccagaaagcaccaggacgcagctcagcctcagaggcaccaggcagagcactggctgctggcaccgtgggctccagactcctgaacggagctggctcagggcagaaggtgctgttcagatggaagcagcaacacccagacaccatgggatccacagcctgctccaggtggtctgtcctcggggaggcccatgggttctgagccacatcctcatgcgtaccgggactccttcccaggaaggcggcagctgggggtcaggctctagtctgtctctcgcctctgcttccgggacatctgcacaagctctgaggccagcaaataccaggatctgtgtaaacaacctgctgactgatctggaaccccagccctcatctgacagagagtggctctaaggcagggattgagtttatttttgggtccccagcactgaggacagtgcctggtgcagagtagtgatcaacagatgtttattgaatgaatggatggatcaatcaatcaatcaacatcctccatgcaaccttaggcccccagcctcacctccctctccttaccagcccacccatcttccctgtggttccaggctccaacaacagcaatcatttgtccccacgaaccatgtccagccccacctcactcttctaggcctttgtatctgctgtccgctatactctcctagtcatgaagagtttggaccttgagccatgctccccaaatgtgagagcaccacatctcctccaagataaggcagaggactgtctcgcacacaagctatcaggtggctgctctgcctcccaggctggtgttgccctcgttcccacatgtgcagccttcacatcacagctcagaactggagctcacggtgggatttgcttggtgattagttggagaatgtgtactgaaaatatccactccataatgtggataaaacctaatctgtattcactggatgtctatgaaagacagcacagaccaatcattgatgcatctgagaaaatacaaagagctataaagaggaaagtgttagcagtggaagaggcaggcggagggtggcacagtcgtgggacactcaaatccgcatggcaaatgcctagccccattagtcaccatgaccgggtctctatggaaacgcctggaagatggtcctcaaaatagacagtcagggagcatgctgggtttctgcagcaggcacagaaaggtccagccctacctcctgctcttcccacctggaggatgggagcagcacaccctttccaggactgttcatgggctgagacggaggggtctcgggagctccagcccgatgtgcagattcggggtccagttgtgagcatggccctgctcctggcccagccctgccctctgcctcctgccttgccatcagaccctctgcagcaggaacacactcactccgggattcaggccccagaagcagggagattctggtggtcccccactgcccgtagtctggcatcagcacccacagcacagcccccaaagatcacacccgcctctgtgagcctgaggaacatgctctctgctgggctccaagcctgaggaacatgaggaacatgctctctgctgggctcctgggggtttcttcaaacctccactaagtatcttcactttacaagagggaaacccaagttcacaggacttgaccatcagctgaagtcaagactcaccacgagggtgcagcggaggctgtgccgagaccccagttggctcagcgctgactccttgccagtccgagccacgcaactgctgtcatcatcacacaataaagttgacagctttgctctctgccaagatcccataaaatattaataacttctgagaatccacgctgagggaatcgccccaaaacacagaaaaggctctagaaaaagccactacatgtaacttttataatagcaaacattctgaagcaatctaaatgttcaacaatagaacaagtattaaattatcttgtattcatttgataaagtatagttcagcccttaacaatatgtgcgagacatgtttataacatgggaaatgcttatacttttgtcaagcgtaaaaagggacacagaagtataaatacagtaggatcatccctatggacaaaattagaattggaaagtagcaaaaagacttgggaatgcacaaaaatgaattagaggttgttttggggatagggaaaggctgtttttttatctatgttttctgattgtctctcatcttctaccatgagaatatattcctttcatgaagtgatctagccggaggttgagattctggtggaaggaactcatatttgaacctgggggctgttccctcccagctgtgcagtgctgggggagaccagctgtgctgagctcaagttcttcctctacatgggagaacctcaggcttcagggctgtggcagggctcggaaataacaacctaaagacctcacgcctggcccagcaggtgagctgtcctgcaaaacagttgctttgaaattagaggctgggcctgctagcttgcacctgaactcccagcactttgggaggccaaagcagaaggaacgcttgaggccgggagttcaagaccagcctgggcaacatagggagaccccatctctacaaaaattaacaaatacaaataacaaatacaaaaattagctgcgtgtggttgaagcgagaggatcgctgagcccaggaggtcaagaatgcagtgagctatgattgcaccactgcattccagcctgagcgataagcaggagcctgtctcaaaactatgtacaaattcaaaaattcaagaagaaacttttcctttttgaactgaattagtgagcctgctccaagtcagagaaagaatcagtcaggccaggccaaagctggggatactgagtctgccagggaacgagggcccagcccggcatggcggcctacgggtgtgatagaaactcccacaggccatgggggcttctagggagctgcagccttagttcatccttggaggggactctggaagaatggtgaggggagcccaggtcatggggggtggggcgcagggaacacggcagccccaaagccctggctgggggtgaggagtgggtgggtccgagacctggattccactgcgcgggatgggaggggagcttcctgggctgtgtccctggatgtggaccctgcaccacacgtgctcccagtgggcctgaaggcaggtgcaggacgtggtcatagtgaggggcagacaaaactcaccctcttctcatgcaccaccacaccgtggctggctaactaaggtctgaactctccacctgtccctgcccagatggtaaactcaacccatccctctaacctaactgagagctccctcctccacaacaccatcccagccccttcccttcagagccatctcccctcctcccaaatgccctctgcctgcaggatcaggctgctccggcccccgcaggctctccccaggcctcccctgtgttggccctgctgtcctacaccaggcacctcctctcctagcctggagttcctcgagggaatgaagagagagaagacagagaaagaaaccagggagattttaaatgctcgatttgtgagcactggttacatggcaaggaattatttgtgttagcttgtttcattctcccaacatccctgcaaggtgggtgagtcacaacacttcacagagaaccagagctcagagcataagtaactgctcagggcactcggccaacttggcaaaacacagcaaacttgagaccagaagcaggtctgtgggatttgaagccaagatcgttccatggggtccgcgtctgcttgttcctccacatcccaagggcctgaactataagtcacagggcaaggtgcctgttctccctctctttgtatatacacagatatataaatgtgtgatcccaaacaatgctcaaagagaagactctgctcagaaatggaaaacccccacatggcttcttcgggaagagatgccattcaactcagctgaggtccctgcaggctttcactgtgatcttgctgcagtcagggaccaacccaggtgtgcaggcggccggcatagccatggctcccaagcaaagcaaagatgccaagggcctcttaagtggcagaatgcagtaggagtggaaatggataccctggtggccatggcaagacccttgccccactgggactcacagatccagctgtagcattggggagggggctggagtcaccttgacccctgctacccagttcagctcccatgccctatgacttgcaaagtctcaagaatgtgctggggtcccgtttaaggtttaaggacttgacccaacccagaccctccctgcactccccaccctcctcacaggggaaggctgagtgtcctgtgcccccttggaagatcaccttggaaatccaagttccaacagtgcccacgtcacaatcgagagtcacgtgcccatgtgatgactaaacatctcaagatccctaaaaaggttcatagcctttgacctagcagtaactcttaactagaaaacttgtctagtcagaaaatcgaatcaaaatgtatgtattaacatgttcactggaaacagcaagatatgataatagtgagataaactgtgacactgcaaacaggaaaatatcatgccccatttctggaaatggttccacactgtagtgctaggccctggccttggcaggtgccgccagcgactaaaagcgcaccgctgagctgctcactgccggggctcccacagggacaggctcacctcctgaaggcagaaatgcctttcagatcttagcattgtttcttaaaagccatgcattttctccaggataaagggattatattcgcattatttgccaacatgcctctgtgcccacaaccggcaacccaaacactatcaattaccaaacagaaaaagcaagcctggggaagaaacgacgtggtgctgcagaaggagcctcctgccctcccgaggttcctctggtggcctctggctggagagactgtccacaggctcactccaggagtggcagcagctggactacccctccctggggaatttgtttcttttgcctgatagaatatattaagacaagttgaacctcattttcactagtctttttagggaatccgaattcctttagatccagatgtattttctgttcaaaccttaataatttaacaaaaatagatctgactgccaattggtttgctcagcactcatttacagagcatcacatgtggtaagcgccccatctcctatccaccctttataccacctgagctgcctaacaacctgctgaagcgggaattatgtcctccaaactagcaaatagacctgctctggtctcatgatgaagtcactcacccacatctgatgactgtcctcagatggctgaagtgctgcgtctcaaaccaccaccctaacaaaggcaaggctacctttctttagttatgaaaaaaagagctggcctaccaactgctaaccatctctctatgccagaaaaaaacagctggcctaccaactgctaaccatctctctatgccatgcaaacgagaccttaaaaccaccttctcaaattctccaagaacagagacagaaaaagatggcagctcttgggccaattccgactcgctgaaagcaagaaaaacatgtaaccacctcttaatgccgtgggccacactccagaccgcagggcctcacccctctccttactgtcccccagactgaagagctcctgcctgggcctccctctgatggtggccccaccatgcatggatgccaggaagggggtctatgcactgcccagtccctggggtgggcaagggggtggtgaggatgaatgccacagattcaaggagagccccttgtgagttttcacaccagggcttgggtatatggctcctagaactgggttgatcttccaggaataacagaaatatctgcataaaagactctgtagcttttaaaacagaagtgattataataaatcattgctttgcaggcggtagggatttatggagtgccagacacatttacaaatgtcatttcactttgattctgagccccagagcaacgtgtgaggtcgccatgggagaggtccatgccgccctgagatggggaaatggaggctcagggtgcctccctgacgcagcacgtggctggaccgaaacataaatccaggacccctggctccaccaaaagcctctactacaccacagaggggactgaagcaccatgaagaaggcctttgcgttcagacaagagtgcagtgaataccacggctcttttctctcaccctgtccccctacctgttcccccagaggctgcagtgaaacaaggtcaacaacgtcaatgaaatgtcacctctcaccctgcactgagcccagctgtgggggccagtatgcatctgcgcaggcctggtcccaccactggcccacgtcatctatggggaaagggagtcagcacagggggtaggagggtggcgaggagacaggtgcgggtctcagaggaaacaatagtgcatggtagcaggggctgcactgagcacataatagacatcatctcatgtaatccctggagtaacttatccagcaggcatcatcccattccataaaggaagaaactcaggctcaaagaggtgaagtgatgtgctgaaggtcacatagctaacacatgatagagctgggatctgagtccagggctacctgatcctgagaggccatggaaccaaactacatttccaaaagaaatccctgagcccccctatgaaaaaagggtgctacggattgaatgtctcctccaaaactcacgttgaaacttaatccccagtgtggcagtgttgggagctggagcctttaattggtgattgggtcgtgagggctctgccctcatgaatggattaatccattcaaggattaatgtgttgatggatgactgggttctcatgggtgggaaaatggtgactttataagaaaaggaagagacacctgagctagcacatgagtacgctcagctccctcgccatgtgatgcccagcaccacctgagcactctgcagagtccccagcagcaagagggccctcgccagacatagctccttgacctgggactttgcagcctctacaactgttaagaaatacatttctttataaattacccagtttcaagtattctgctataagcaacagaaaatgaactagtacaaagaggaagaaaatcagggcaagaaatggaagcagcatgtaacacagcagggggctgagcctagcctagagccttcacgcctcccggcaggcacctctgcccacacaggcgtgtgcagcttccaggctgttctgtgctgagaggcgtcctggggccaaaccaacttcctagtcctggctctaattgtccactgttctctctaatttccccactattgtaaatttttaaaggatgttcttagtacacccaggggagagggcaaaatgaacagaaaggacctttatgatcattaaggactaaagcttttcttcatctgaaattcccaaattgcccaggcttcttccaggcgccccaccagttttcaggcaggaccgggctgaggttcatccctggctggtagaggcctggtggcctgtaacgcagtgctcccggctctgctcactctggagcccctggggcaagtgccagcctctgagccttagtctccctgtttgtaaatgatggagaaaacctcactcacgggactgtggtgaggagtgcgtggcagctcttatgcaaaatgcctgggacaggagatgctcaacaatccaatctgacatgctgcaccagggaggcaccctgagcctccatttccccatcttagggcggcatggacctctcccatggcgacctcacacattgctctgaggctcagaatcaaagtgaatcgacatttgtaaacgtgtctggcacaccataaatccctcttctctgtcctgtgcctctccaattccagaaccctccctacccttagggcccacctagaacagtgtcaagggcagttcgtgccctgggaagggcattgtttccagactgcagggacttctccccgctcagccttgtaccatcagaacctctcccccagggctctgctcctgggtgccccgttggtcacctacccaaacaaaggcccccaagccatctcaaaacccttacctggggctagggctgccgaccctcagacagaagggaggagcccacctgctgcccacttccccaccccaagtcactctgttctttgctcttgggcccctgttctgcctgtggccctcccttcgctcatttgccccatgaaagtcctgcatagctacctggtggaatctcctctggcaacagataaaatacagctaatccccctgggcctgaccccatctcacggccaggggggcccagatgtctttcccggctcagctatctgagtctagggacacggctgactgtgctcaggtcatcaggagatagataggacattcccacctagaaaagtggctgggctacagggaagcctccagagaaccaaactgtgaaaccctctgcagaaacaccaagcctttccttcctgccactcaggctggctcagagaggaggaagaggccacagaaggagcccgagtgtaaaatggaaacccatagccgccatgacggtgcccacctggtcccgacagctttcacctgtgaggagccaggaggcagcctctgcaggatcagggggtctccaggctgaagggcgctggtggagtgcaaggagaaaggcttgttttctcctcacaccactggaatcatttccatgtgtctctagcccatgaaaggggcagaacaaatttattaatgaaccggatcctggatcaaagaggagctactcattcacaatgacctcttgggtaaagaagaggaagaaaggggatatgtatgcttgcaactgactgtctgcaggggatccaaaatagatgagctgattaaataatttccagataataaagattctcacttcaaaagaaatgctaagcttgtttctcagcaaaatatttttgagttcaatgtagaaaggcacagtgtagggtggaagttcccaggtgcaacaagaagaagcagtcaaataaactgtgctaagtgtccagtaatggcgttctcttggggttgaacacaacgttgagttgaggcatttacaaaccaaacaattttccacacagacagcatgaaaagctgtccatgcatagtcgtggtgagtggggtgaacgcaaggggttcaccacaccctgttctcttttgccatcccaagccactctcagttctggaaacagttgcagagcacacaccccgccagacacagtcaattgccatttcggaagacggcccactctacaccaagtgcaagtcaagatgtaggccaagatccgcctgctgcacctgtttcaacgggcgatgagcccttctcatgtctgcactgtcaccggagtgctgagctgcccgcctaggtgaacaaagatgacctcacacagaggtgctggcgcagtatggtgagcccgtctttttcccccaaggtttcccgtgatgaccttcagtacccaccaacatttggggtgcccagccacaccccccaagaccttgctcgtgcatttggagaaaaggagcacatccacccagaatcgatgggtggctggcgggtactcaccccactgcagaggcgccagctgcaggtgctccaggacgagctggttcaggagtccttccacactcgcctcgccactgcgcttcagggaggggtgagccttggtcaaggaaaacgcaactcctgcggagcccagggacagaagaacgtctagaagtctctagacagagaccctcagatgggaaacctcctacagcagatgtctcccctcttctgaagggactgtctaaccaaccactatgacatcaccctgggtatgtggacatcaggggcatataaaacagcaagtgcttgtcctcctacccctcaaatctggtaaattaaactactgttatgtaagaaagggaaatccactgggataattttaatccaacaactattcttgctggggaaaataaagagaaatggaaggttatttttccttaataaaatatgcaaactggttcactgttcaatacaacccatgagttctttgacacgcgtcagtttcatgctggtttcacgtcggtcctgttatccttcttgatgtaattacacatattattacgaacgaactcacttaagcaagctcataatcgaggaagccataaagtctctcagcaagtatcagtgggtgaagaaattaggtttaaaaatgtagaaaacagaaatctcccttgcgctagtattaaacagccaatgtgattctcagatctgtaaacctctttcccttttcctacataagttaaagccaccacatttaagttgcaataaaaggggaaaattttagtttctgacattctctagtgactgcaaaagtggagaaaataccccaccttccttcttcctttcataaattaattccattcaacaaacacatccagttcatctgaagcacaccatgcacagcaggtggtgtggccttgaggatgaaggaagggtgggccacgcaccctgaagctgagaggttcccattctggtgaaggcagcaacgtagaacctgagaatcgcattggccaaccccagggacagtcctatgggaacaaagctcctgcagtctgaggtagaatggagcagaggctgagcattgcgagagagagggagcaggacgaaatggaggcccctgggtctctcctgctggctcatgggggagtcgggctcagaggtgctcagcagagcgggcatatccccctcatcaatggtccaatgcaatagccacagagggctgtccagacaagaaggctgcccaagagagcccgccggtcacaccaccacagccaccagcagcaggacaggctaaggtcagcaacatgctgccctgggggctcgggaacctctacccactcctgtgtcctattttagcttttttttttttttttttttagagacagaatctcactctgtcacccaggctggagtgctgtggcatgatctcggctcactacaacctccgcctcccaggctcaagtgattctcctgcctcagtctctcgagtagctgggattacaggcacccgccaccatgcccagctaatttttgtatatttttagtagagatggggtttcaccatgttggcccaggctggtcttgaactcctgacctcaagtgatctgcccattttggcctcccaaagtgttgggattacaggcgtgagccacagtgcccagccctagtttagctattttggacttctttcaattcttcccaaatactgtgtgctctctctgaattccaagcctcccctcccacactctgcgtgttctgcctggaaatgtctttccctgccctcttctcttccctgactttatatctcaacctgaccttgcttctcctgcaggaaccctccagaaagtgtgcatgcatcccatgacaacctgtgctagacacggtcatcttcctgttacttggcttcagccctagcctgtgagctccatgaaggcagagacctggtcttagggcctagaacagtgtttggttcacagaagttgctcaatatatattgcctgatgaataaatgaacactaaatgagcaaatgtcccaggtaggagtgcagaggccacgcctcattcagcagcacagcccgtagcccctccacacgcagcacagtgcagtggctatgagactcagcaaaccttcctgcacctgacacccgtgggcctgctgatggcttctgcacattctcagggttcactgctcagggtcttcttgctcctggctccagtccgcacatgctgcttgcttcattccacagcaccccaaatgtctaactcatcccgtcctccctcagtagagaatccgagggcttgggagctgtggctgaagctctgaggccggcagagatgccctggccctgagtaaacagctcctgccctcactggctctgctccctctcttctcttcgtggagcttggtgccgaaaagggcaggttctggagactcggcccaactttgaatcctggcacccccacgaatgagctttggttaatttacttaaagtccctggcctcactttcttcatctgtaagatgagcatgctagcagtgctaacttcacagggccgtcatgaggagtgcacggaatcatacccctggcctgtgggtagcattaagtaagtgtcacctactgttagcatcagcctcatccccattcttctcctctctcctgttcctcctccctctcggaggagatgcagaaacttctctccttgccccaggaattcacccaccatttctgttgcctcgaactcccttgggggtcttactctcgcgcaagcaatttatcaaagtgtttcctgcaaagataattccctcccttagaagaattctccaaacgaaattttctccatctcattacacacacagcctatgtttgctgaactgatattgttactgacaaatactctgcaatgaacttttaattatctcattttgccctgtgacaatcctggaagttcggattctagcattcacctcattcattcaatagttaacaggcagctatctgagctagggtttagggttatggagctgactgtgacccaacagacagtcttttcagaacatgctgacctccagcaatcatacttccaggtttatacccaaaagaactgaaagcagggactcagacagatatttgcaaacccacgttcactgcagtgatcttcacaatagccaaagggtggaagcaaccaaaagtctgccaacagatgaatgaatcaacaaaatgtggtctatccgcaaaatggaatgttattcggcccttaaagaaaaggacatttttgacacatgctacaacatggatgaaccttgaggacattatgccaaggggaataagccaggtacaacaggacaaacacctatgattccaccgatctgaggcacctacactggtcaaatccacagagacagaatggatgtgggcggggcagggaaatggagaccccttcgcttcagccatagtgaaagcaggtggcctaaccacggagctgaacagttgtcccttctcgggagccagtccccaggcacagacagccacagatattttctaacctcacttggggcctgaatcgcctgaactaggtgcttgctgggttatgagaacaaacgtttccaggagtgctcagtccctgagggagacaaggaatgggagggagtgtttcatgggtgcccagtttcagtttgggaaggtgaaaaagttcgggaagcagatggtggcaatggctgcatgataatttgaaaatgtttcacactcctgagctggacactgaagcacagttacgaaggtagattttcttaaaatgccgacccaggaaggaggctataattaggaagcagagcgacgctaaggaagcccggaggaagccataatcaggaacagagaactgagaaatctcgcagggtagcggcatctgagcagagggccacagcaggagctcaggaagcactggacaaggacagcccccctgcggccccctcgtccttcctaaggcaattttgcaggcagcttcctccaatcaagcatgcagccgccctgtgtgttcattcattttgcgtcagtggccatttcctccctcagcagtcaggctgcatctccatgaggggtgctccttctaggggagtaggcacaggaagcaacagctggggatcggggtcctgccttcctgcatctcccacgatgaggacggaggccgccgccccgggcctgttttgagcgccagcagcagcgaggcacccctcaaggaagcagcgccctgcagctcctttatctttttgcaaaagcgaatccgactctccctcaacgagccagcacacgtggaacccagtgggtttggatgtccggggtgtttgggacctcaggcatgacctgtgtggtcccttcccaagccctaagccgtaacagggaggtcaggccctacgggcatctggccattcgtgctctccgttccgagcaccccatcagggctaaggaggtgccctgctccaggcccagggacatttgcagaggttgagcttgctccctaccactgcactcttctcaggagaaacagccaggcccaaggacaccatgtccgcctgcccagggcagtccatggccagccaagccccagacttgaggtgaaaccaggttcctaggcatctcctgggaggaccttaggctctggatatgtggcaggctcacaggtggagagagggctggcctggctgggcgacgaggggtcaaaggccattgtgagggaccccttcccggtctgttttctcagttttcaaatacgggaaggcgaaggcttgtctccctcagggactgagcactcctggaaacatctgttctcataacccagcacctagttcaggcgattcaggccccaagtgaggttagaaaatatctgtggctagatgatgagttagtgggtgcagcacaccagcatggcacatgtatacgtatgtaactaacctgcacaatgtgcacatgtaccctaaaacttaaagtataataaaaaataaaaaaatttaaaaatttaaaaaaaaaaaagaaaatatctgtggctgtctgtgcctggggactggctctcaagaagggaccgctgttcagctccgtgattaggccacctgctttcactatggctgaagcgaatgggtctccattcccctaccctgtccacggccaaatgcctgagtaaacggcaacccacgctcagcttcccagaaattttattttcttaagaggagttgcttagtattaagaactcattggctgggaaggtttgtgtctttatgagcagggcattgcagggtttcattgccacagataatgagtgaattgtttttcttcctttgaacccacagatttgaatatcctcattttaatgctcaaggcaccatattaaattacttgtcaaggtgaggaatgtgagagtaagggaatctcatcagcaaagattaaagaacttttctgaaggaaggggaggaagcaaagcatgcatctggcacgtcggagaggcccagggacacctgtccagtggtgaaggggcaggtgctcagcccaggagcctgcacttcaccctccctacagtcttgctgggtgagggctggagctaggatgcaatcccagggctatgtggttcccacgcctatgcttcctcatgcacgtgctcatccactcaggctgggccctgggctggatgcagggtcccgaacccagctcagcggcacatgcggcaccctcctggagctcctggtctggtggccacgggccaggtgggattggctgcaccctgctccccgctggggctccctgaatccatgagttatcatcaaactcggggcttgacatctttcaagagggcaagcaaaaaatgcagagtccaccataaccccatggatctgcacacttgtgggggtgggcagaccaacagccaagagctcccatctccagggtgcgtgctgcaggcagggcccgctctaagcagcttacacgtgctcagcgatttaacgttcatcatggcattacaaggtaggcattatctaatttacagagaaggaaagaggcacaaaaaggtcaagaaactggccaaggccacacaccacatggcagcccactctgcccccagaggctgcgttctcagccactgccaaaggcctccaagttacagaaactgggcaacaataccaggccccgaatgtcatgtttctgcatgaatatgtgcatgcacaccagtgtgaatgggcacatacccatacatgggccgccacaagcacatgcgccgcagcaccccgagtcccgcacaaaggcaaggctgctaagaagcttcagggccccgctccttcctggccagggaaatctcctgcactgctgtgctgctctggcccccaccccggcatggagccctctctccccatgtagtacccaagggacaccacgatggctcataccaggcccctcctaggagaaggtcagggtagagggaggggagcaccaaggtggccctgagactccagctgcctctctctggagaggaggtgaaggagaacctcctgcagatgaactgatgacagtctagctctcaggactgtctgccctcaagaatctcagaggcagaggtcctagggccccactaggataaagagacacaggagaaaatgtggagacagaggaagacaaagaataggccagagggctggccctgtgagcattacgatgatgacgtctgccagtcacgggtaacacgcaccacaggtttgggacaggcacccacggtttattttcttggaaactgtacagtgtattccaaaactgctcaattccagggctcctaaggttgccccagcctgacccacacctgctccaaaaccactctggctttcctccgctatagaagcacacagcagcttgggtactcctccactatagaagcgcatcgaggcacaggcactcctccactgtggaagctataccatggtgtgggcatccctccactgtagaagcgtgtcaagccacaggcactcctctgctgtagaagctgcaccatcactggcacccagtcgtctatcagccagggggaggggccctgggtgcagtgttcacagcctcagtccacaacgacacctactctggacagagggagtccccagtgcccgttctgcaggtggtcaggaggatgaaaagatagaggggaaggctttcaaccttactgatgctacaggccctgtgggagttaaactcactctgccctctaaggatttacaaaccaagacgtgccgtgtttctcgtagccctggtgaggggctccttcctctgtgccccacagccctggcgagatgcctctcctgtggagcttcaggggctccatgctaactgtccatttccatgtctgttttcatagtggacttggagatccacatcctcacggcgtgccgcagacctggacgcaccctgctctctccttttcaggctctgtgcccagctcttcctggaatgtccctccccttcttctacctggcagactcctctctttcagacccaacacaaccatgcccctcaggggagccaactgagcacagccacatgcccaacctgccctggcggtctgcacaatgctctttcgagcgtgatccagcaatgctgcagttggcacttgcatgtctctttcccttgaggaaccgtgaacacctttctttgaagctctcatgtctcatgcaactcctcggaccaaaagtagctccataaacatggattaaataatgtaatgaaaacatgcatggcaagtctgcatgaatgtaggcataaagaaaatgacggtattcatcaaaagctgcccttcaccagcagtgcacccacaactcatcttcagcatgaggaacagagtggctccctgacgatctactctggcacaccaggaggtaactgatgctggcccttggcacaaagtcggcacacacagccagtaccgtctaacatgtgaggggaccgagcctcgggaaggtcaaacaacttgctggctttgagtgacaggcaggatgctagccccaacctgggatgtcacgtagcaccacgtgatgctcacagagcggaactcctccctgcccacaggggcacggggcagatgcaagcctgctcccagataactccgaccagtcctgtgaattcttctgtggcaaccgcttggcaccagcatccctgcccacagccaccctgcagctgcctcaattcctgttactccatcggccacaccagccctgcgtgctgtgacactgctggcaggaaaacacagccagtgccctttatgagaattcttagaggtttcgggcaactaattttgatttagggtaagtttctagaaggtctcaggctaactcagggcagccccctgcactttctacctgtcgagtcccggcaccaacaagaccctcaccgagcagtgtgcaaagctgtttccctccttgcggggaggcccaggagagagccaatgccaacccccaacgagaccactggtcaccgcgcacgactgggtgatcctgggggggtgctgtcctttccaggaggggtcagctctgctgagtcagtttgccccaagcccccacctcaccagtggcctgggctcagccccactgctgcggtgccctgagtgcgccactcctcctaggaaacgccatcccctgcggagtgtgaggggactggaccccgggaactggagtgcctgcagcggagggaggggggggctgctgcttctctttcccttgcagcccccacagaacagagcaacttcctcttcagtaaaaaagacatcagatctcacttcctccactcctgaccagacccctgtgagccatgctgtgactcactctaatcaaaggcagaggagagtggaaacgtgtgtgccgtgctggcaagatgagctcagtttcactgtttctggtttcggcgttcagctgtcatctcacggccctcatggctcatgggcacacgaagtcacgctcagagcagtgaccaatcctcactgaagaaaacgctcccactggccaattctaaatctcagagtcgtccaactgggtcccagagtggaagggggaagggaagacacgttgggacatgcctgagccatgttgggcactacgacaagggctgtgcctgttcccttcaactaggtggggccaggacagttgccactcttactcagggaaagaaccagaaaccggagggctcaaccacacgtcccgggctactcggggacagaacggccacccccggagccactttaactccagaggccaggctctttcctgcaaaacgacatctccagaggaaaaggacctgctcaagagcccgtctgccagactggtaacaatatggaagtggaaaagcatccctgttgacgaggcggggggcacacaggcatgctcccgctttgcggtaatattctgcagcaggaaagaggagagagaacattgcctatgaaataatatgagaagtttcccaagatatgcagtaagtgaaaaaagcaagatgcaaaatgtatacataccttttgtgtaaaaaaaaattacggtaaaaagggtgtttgcatgtacttattatttcagaaataaattttgtaagtttctataagaaacaaataaaagtgggtgctctgggaggtggagaaggaaaagggaagatgggaatgtctattttttaaaacgattttgaaccatgtgcacctacttaaagtaatacaaaaattagcataacaaaagtaaacaataatgtgcccttggtaacatcatgaacaaaattaaatgttgagagttcactatgggcctgggacgctgggacacagctgcacttgagtgtgggcctcaccccggtcagaactgagaggctctagggaggcaagtcactgatacacttgggctcaaaacacacatttttgtttttctttctttctgctttccctcctgattctctttggagtttattttcactttcttgaaataaagacctacattttggcatattactttcattaaaaagtctcacaccaggctttggaggcaggcagcagccccgtgcctgcagagcagagaccatgcctaacaggcccggccaggctgagaagctctgcagtgattagtctggggagcaagtccgcctgtgagtaattaccaagttgccaaatggtgctggagctttggaagccattccaatagcatatttctgtattaatttgctttcggacatgagccataaaattatacagctaagctaataaagctaattacctgcatgcatatccgacttcctttcagccctgtaagccacccaaacagtcttgcatctcagcctgtgcacaagaatggcaaggctggctgaaggcagcgattacagccacagttgtaatactacaacatacagtggcaatggtggcagtgatgggggtggctactatctcttaaatacgtggaccctggcatttggagcaagaggtcaatccataatgatgatgacaatagtagttcctatcattattgccactatagagaacatttccaaggtgcttgctgtgaaggatgccctgggtaagtgctcaacacgcatcttctcactgcaatactcaccactttcaagctaagacttcagaatatggtgggtatgagataggtactgttattttcatttcaaagatttttctagaaaactgaggctcatggaaagaaaaagaaagccagtgccgctagcaagtggcaggggccaggcttgaacccagccaggctgacccctgaacccacactctgctctctggctttcagagattattcgatatgttgtattgactcctcaccgtaaacctggaaaccaggagccatgagtcccactggacaaagatcctgctgtccacagggccaggttgtgccaaggccctgcagttggccagcagttgggtcagtgtccacaccaagcctggccagtgtttttccagcccagagggaagcccagcacagagctctccatggtgctgaagcagctgcctcccctcaaggctcttcctaggcacttggggatgaagtttccaaatcgtcaacaggtttttacccccaccattctgcccctgcctctcaggagacagagatgaacacactggcaacagaactgtgaaatcactgctggggccaacccaggcttcacagaagtcccctaacccatgcccactgtttaatgactgacatccctgcgtgcctgagccctaagaagacccacgtcccagcccagctcatgttctcatatctggagctgcccacaggcagtttctaacacccttgcaaggaaacacaaattcctctcacagcgtcctccaagcttgccactttctgcctcagagacacggctgagttacttggagtccattacagtttgctcacatgccctgctggtcaaacacctgtggaggcagtgagccgtgaggtccaggggctggggctagccctgctcagtttaaccttcctctgccatccctgctcaaaccagcaagatgaatgaggaggcagccccaccttcccaactgcttagcttcttggcctccccgtgggaaaatattatttcaaagaacagaaaacatgcaatccaagccactaaagaaagaattcagaggactgcttgtggttccaagccctgggagaggaagggacagtaccccagtcaccgccacatggtagaggctccataaatgcctgctgcttttccctgagcacctgtgatgtgtcagttacctacagatcatcccacatagtcctcacaacaacttcaggtttaggaagcctccttggggatgttaggtaacgctcccaaagccacacagccagaaaggggtagattcaaactcaccccagtggggtttcaaattcggggtctgctgctccaagagcagtgcccccttccctgtccagactcctcccatgaatccgtgtttccagcataaccagcctgaagtccacagcgtgccagagtgacggggtcaggagctcaccttcaaagcagcactaaagacacagagacttttgggtgctgtggaacgttagaggcacttgtgttgccccttgaagagggcgagagccccttggactcagaaagcctttttctcctgtgaggtcacacatgaagttttctgggggacgacgtaaggcagtgggaacacagatgtgctctgtgttattggcttaggccaataacggtgtcagctcgtcccctgccagtgagatggtgaagcataactccaggagtaagtggcgtacgcaagtggggctcctcctagaagaggggcaaggggcggctacttgcccaggaagagcagccccaaatatggcaggcagggagccccagcacagcacttggcaggctgccccttggctctgggccccgtgcctcacttccacggtagcgccagccaccctgggcttcagatacttgtggccatgaccgatttcccaaactagaccccggtaagcatcctgaggacaaggggcaggtttacggtctctgagtccctaattcatttccacagagttggtcacaagtacaagtcaactgaatgaatgattttttccagggatgatgcagaagaaacctgatggtagctttcagtgaccacctatgcaaggccacagtttatcagcgaatgtccacccacacaagcttgtgtccgggaagatttactgagcacctactctctacctggcactggaggaagccacgcttcctcggagcagcggtcttatgtgtgtgttcagcccacaaagattacacagcacactcaactcagagccacattcgagcttcatacccgccacatgtgagatgcagaggatgtggctcttctgtgaaggggaaactgaggtttacaaaagttgcatatgtcataccccgctctctccaacagtatcagatctcaatcccttccgtgaatttaaaaatctggcttgaagagaaaaaaatacacattgaaaaaacagaaacaggccgggtgcagtggctcatgcctgtaatcccagcactttgggaggctgaggtgggcggatcacctgaggtcaggagttcaagatcagcctggccaacatggtgaaaccccgtctccactaaaaatacaaaaattagccaggcacggtggtgggtgcctgtcatcacagccacttgggaggctgaggcagaagaattgcttgaacccaggaggcagaggctgcagtgagccgagatcgcaccattgcactccagcctgggaaacaagaacaaaactccgtctcaaaaaaaaaaaaaaaaaaaaaagaatttaaaaaaacagaaacaaacaaaaaaggatatttagttgacccttgaacagcatggggtcaggggtgtctaccgcctacacagtcgaaaatccacatgtaatttttgactccaccaaaacttaactactaatagcctactgttgaactgaagtcttacagataacataaacagtaaattaacacgtattttgcatgttatatgtattacatactatattattacaataaagtaagctagagaaaagaaaatattaagaaaatcatgaggaagagaggacacatttcctattcatgaagtgaaagtggaccatccttcatccttatcttcacgttgcgtaggcagaagagcaggaagaggaggcactggtcttgctgtctcaggggtggcagaggtgaaagaaaatctgcatgtaagtggacccacgtagttcacacctgtgttgttcaagggtcaactgtgccctgagctataccggatactccccataattacccccaagagagaggccccatcccatcttccttctctgcaagctgcatggttcagagcagggtcactgctctggttttccactgtaaccctttagagcagaaatgagtttcacaagtcaggtaacctacacaccagcaagaatcctgtccctagttggcctccttcattccaactcgacaccctttaaaggcctcaccaagggctgagggcaggaggctgggagagaaagcagagacagacctgtactgccctatatgtacatttggagactcttgtgcctaatttccaaaggcagggagcacaaccccacagaaccaaatgtgttctagatgtacaaggccaggccaggagcaggtggaaaggaagacttcattccaccatttgaccagagccgtctgtcctcctcacggtgaaggtgatcccgtcactcgctgggtcaaaacccttcagggcgacccactgcttttaggacaaagtcccaacaccccagcacaatccataagctccctcacagcttgcttttcctgttgccgcttccccttttagaccctgagcccgtgtgcgtgtgtgcctgggtcctcacttccagagacggcgctgtttgctgtctttgctctgcttcccctgtgcctggagcacccttagccttgtcattctggtgaacacccccatcttctagagctcaaacattgccttatctgggatgtctctaccctggaaaccaacccttctgtcctccctggctgccaccactgcaccctgcagagcacgcatcctgtccttgctgtgttaggtgctggggattcagagaccaagttgggggcctccctatgttaaagaagcccagcctcctgggcaaggattatatcctacttattatcagtagtcattcttccttatttatcacatttaattatttaatcaatatttgtacagagcctttttgtttacaaatgttttcatgtgtgccatctcagttaatctccatgtcttgggaactatgagtgttcacttccaaatctttgaaaaacacagccagatgcaaagcaaatgcacaaggtaataaaacaccttccttgtcattttctgtaaggccattagcagtaaaatatttggtaatgtaccgcagtcaaagaccatttgaaaccatggggcagctttgagatcctgtctatatttatgtgactgaagtctaccatgacccggtttggcattttaggaaaacaatgattgcttagttcactctgcccctgggaaacatgaagccagatgggaatctgtgaggttctctttggaacctgtagacctgaggtgtgtgagcctcatctctcaaaaataaataaataaataaataaataaataaaataaataaataaataaaaataaaataaaagtaagtgctatgctcagaacatctggttagtatccaaagtctacagagcaaaagcttgaactccatcatggagaatttgacatgaaggttttcacactggatttgggttgagcatcatgaagtgggtgctctggggtggcggtgacttcagttgggtcatctctccctgctggaaaataggctgtttgcatcccacgcgcaagctctggagtgaatgactacaggtgcaagggctcagcttagccccacttcagatcaaataaattagcaaattgtcataaatagaaattacactaatggaaagactgctttaaatgattaatgagcctctttgccatgactttgttttctaatttgcatcatgaactttcagaatgctgatgctcttgccgctctcatttcagtaagtgccccagcgtctcagctgagctccctggtgtgagagacccaactggacagaagatgtcacacagtgggacgcgctgccaaggggagaggtctgcaactggctcactgctgcaaatcttgcctgggtgagaatattccagagtcccacagtggagagcaggtgaaatggacagagctctgcatggggcgatgggtaccaatcagtggtgagacctaggaatgctgccatctccataggcttcctctggtaagtggggataatgcgaggccctggcagaagccagaggctcttgtgcttcttcctagatggagctgagcacacagcactgagggcagcagctgcccgtgcccccggctctgccacggaccagctgggtgacctacagcaagcgaggtgacctcgctgggcctcctcgttttctcatctgtgcaacgtggataaaactacttcagagagttgttgtgaaagtgaagggaataaatctgtataaattgcccagaacggtgcctggcatctagtaagtgccatatgggttttagctgttacttaagctctgtaactttatgattctattacataagctacgcatgctcacaataatcatcacgctaaaaatacagtgtgtatatgtccaacatgtacctgatcacacaaacacaacacacgtcgatccgtgtgcacgttcacacacacatgcatgcacacacatgaagatgggaaatgatgctgtggatgccggggaaaggcccttccccgctctcatgttccagatctgaagtctgtgctgagtatgtgtcaaaccccggccactttcaaagtcatttcaaggtgggcatggccaccagatttggatttgggggaggcagcaatcaaatctgtgcctctcccaccttaccctccagcccaccgaaggccaaacagccagggtgatgtgacggcctcgctggctggcaaggcaggacgtctctctgtggctgacagggcttccctgctacgggagattaaaggcctcagaaccacgttattacaaacagctataaaagccaaattccctcaaggcagatacaaaatgcaaccctgcattttacttaagatgatcaaggaatcagctgtactgatggcaggagccgtttatagtaaaattcatttagagaaaactatttctccaaacataacgattagaaaaacacagtgtgctatgttttaaaagaatcttgtttaaagatatttaatttttttcaggagataagacagagctccattaggaaacatgtctgagaataggccagaagccactttgagaggccgaagggtgggcccacacagcccacgtcaagtgcctgagtcccgcctctgtcctgaaagggaggatagctcagcggaaggcaactcctccttactggaaagaaggcagtcttgaaaatggagaacaaagcccagtgtgactgcattccaggtgagatcacccaaacagggccactgtgcctaaaatccttacactgtcctgctggtgaagcccaaataaaactgacaaacaccgccgccactgtggagcctcttcactttgcagagggtgactgttgtctgcaagatccaacacccctcagcagtgcacagcctgagacccaagctgtgcctgggctccctgtgcccgggaaggcagctgtttgaggacacaaggccccctgtactgagatcatggttacaccgtccacatccctccactctccaagtcatgtctgctcatttgtcctccgcatttcacagatattccactccaatcccctactctgggtatctaaagccatttgccttgggcttctccagcctctaactcactctcaaagcagccaaattggttaaaaatgctcctccagacagaatggaggaggcggatgcgcctggtgggaagagattgctcagacggcccaggtcattcgccttcatggggatcagccaaactgcgcacccaattcttcctactccagctcacacagctggattctgatacctcagcaagccttgcaccaatccctgaaatgctctccaaagggtgatttgcaacaaaaacaaggaaaatgaaagggtgagttgaccctaggcttgccagaagcgtgtccctcccctgcttccacagcagacggtctgtgcagggctgctctggaaaaggagccaggctgcgatgtagactcatcccgtgagttgcagttcctttcacacactcatcacggcactcggcatcgcgcagctgagctggtagccattctgtttgctgtgtcattgaaatggaaactattcattcaacaaaccattttaggctgggcatggtggctcacacctataatcccagcactttgggaggccgaagtgggcagattacccaaggtcaggagttcgagaccagcctggccaaagtggtgaaaccccaactctactaaaaaatacaaaaattagccaggcgtggtggcaggtgcctgtagtcccagctacccaggaggcggaggttgcagtgaacctctctgcaaccattgcactccagcctgggtgccaagagtgaaactctgtctcaaaaaacaaacagttttcatacctatgtgctagcgattatacacagcacttgggcaagcaaaagagaacacatactatcagagcagggtccacacctgattttgagcatctggtgtgccctggtgttcagtccaacctctggcacatggtagagcctcaataaacggctgttggatgaacaggattccacctgacctcaagacggcacaatctggcaagggagaaaatctgcagaaaaaaactaattttctgtactaattaaagactgtaactaacaagaatgaagtactgggtgtcacaggagcccaagggaaggggctgttgcagccaggccgagacgggagggaggctgatggcagagaaggctctgaggagcagacagtgaggtccactctgaaggatgagtcaggagggcctcccctgaggtcaggtagcagcgtggcatgaggtcttccagcaggaaacgggcaaggggcattcacctttgctgacaccttccagggccagaagctatgtctgcaccttgcagatgtgatctcagttgaagcagtcaacaggaaaataacaagttttgggatcctgactatgcctctagttgcacaatctctggtgagttattgaacttccaaaatttacttatgttttgaaaggggtaggtactacctgctttgcaggtctgaggtaaggaaaatgcttctgctcacccataggtgaccaaaaaggccgatgattcttcgaactcatcctgacagcaatggtctgcagcaggttccgtcacaccagctgcacagattagtacatggccctcaggtcacacagtctccccttctggatgctgggagtggcagggccagcctctgaccccaggctccagtcctcaacaatgtggcgtcattagtcctatcccaaaggcaaatatagaagatttctagatcacgtggtaaaggctattatctgctattaacagagttcacagagagttggctatgctaaggtttcccaagttcagtaaaattgtccagtattggtagctggagggtaagaagaagcttaaaagaagaaggtaccaaaggtaggtaggttttatccagaaagcatcactgtatagcaaataagcccagctctctgggccagatgctgcatgtactaggaagagatgcccccgccctccagggaaactgcacagacattacaaacaagcatgctcttatcaagcaggagaggtctgggtcggggggctggggggaaggattctctttaaaatcagcaggctgatgtgggcaagaaagcctaggaaatgtggaagaaagggcttaagagacttgtgagcatgaggagtcctttgtgaaaactttgatcctgggatagaataaggataaatgcacaaagacagcagaagccctccaacctggcgtgtgcgtgacaggaagggacacagggagagtgcttcccgagtgtgccacaggagcagggactcgccccgtgcagctccggggaagcagaagcccttgctgtccccacttcatgatgagaatagagaagcagagagagaaggtggccatgaccaaggtcacccggggcagggactggtgggagaatggtaggaaactgcctgtgtctgaccaggtttcccagcctctcgtgggaaacatggccccaggcttggtggcaggtagtgaggaaagcttgctgtacagtagctaacacatagcagccacacaagaagtggttttcatagtcataataataagaatgataaatagggtttaagaaaagatttcctaaagaaaaaaggggtacccagctgggcgcggtggctcatgcctgtaataccaacactttgggaggccgaggcgggcggatcacgaggtcaggagattcagaccattatggccaacatggtgaaactctgtctctactaaaatacaaaaaaattagccgggcgtggtggtgtacatctgtagtcccagctactcggggggctgaggcaggggaatctctggaacccgggaggcggagattgcagtgagccaagattgtggccactgtactccagcctggtgacaaagcaagactgcctcaaaaaacaaaaaacaacaaacaaaagaaaagaaaaagaaaaaaggggtacctaacccattagctcatccggtcaggcccagcaccagaatgtgacccccactctggaagcaggatggctgaccgccctgggccacctccccaacaacaggtcaccctgtccacagcagggacaggccctgtgcccggccagtgccctgggacatgatcctaggtgtcttcattgtaatttctctggccctgggctccttgtgataaacgtgccccatctcagaatgggagaaggggctggtcagcagggctgggcgctactcagaggccacccacagccctccagcactctaggaggagtgcccgggggtgcccaatcacacgtggggtctgagggaggggacaagaacaaggaggctactgagtttaaccctctgtttcgacagaaattaagtagggaagggcataggggaggggcaggagggagagaagggggaagagaggattgggaaggagagaggaagggacaggcactcagaggccacccgcaagtctgaaccctgcaggttcttggtgacgggtggccgcctctgcactttcttcctgtgccgctccctttgttcaggcccttgtggtccctcggcacttttttcctgggtactcccttcgctcaggccctcacggtccctgacttagagctgctcacgcagtggctcctcaacccaccagcatccccaggggcgcttgcatctttgcaacccacttgtcacactgtggccagggtggctttcaaagacatcaatgtggccatgctcataccctgccttctgggtcccctgctgaggacagcacagcacatgctgaaccctgggccctcttcatctctctacgtgaacgggaatgggctgagatctccacctactcctgccaggcgtgacctgagggaagctcccatcagccccacaacgctgcactgcaagtgcccatctctgtatctgtcccctcccctttgatgggggcatctccagggctcacctcctaagaacaagcaaatctgtaccatatttgtcattaacaggtgaagagtggggtgagagctcccggcagccctgggctgcccatcgtgtcaccgtagctgcttcatagacaggtgtgcatcgacccagtgcaagatccccaatttcctttaaaacgcatctatccagacccatgcgctacaggtgggcaactgctacaactatggacgggtatcaaattaagctcaaatgtttgtaaaaagtctaaatgtttagaaaatattattaaaatgcataatgaaattattagccaattcaatctttggtctttccatctgcttgaattcaggtttacaatagcaaaattctgctattcctctgacaccagatgtcatcaacagatgagagtggggggaagggagaggagagggagaaagagaaagggggggaggaagggatggaggcagagagggagggagggagggagggagggatgatgtccttaatgttaactctctttcactaaatttgcctatagggacaatcaagctctcataaacttccgatcagtaaatgtatggggcagatgtgcttggcacatggtaggcaatcaataaatatgtgttgcatgaattattaagcaaatatacagaaaatagagaagtcaaacgcaaagacattttctgtacttttttgatactggttttcaaagaacgcaagagttctgtgggccactatcatcccattagaaggcagcatgtgctgggcggggactgcaggctggcagacaagctacggggtgcaggaactggccacgccactttctctttgtgaagtggagtcacagttttcatctgcaagacgggaagacaggataatgaaaccgccccaggagtcaggttgccgacaagggtgacgtggcccagggcagcaccagcccagggtggtgtctgggaggcagcagctctgacactagcagggtgcccctgtgtgcccagcacaatgaggccctgggaggggaggggagggctcaatctctgtgaagcgtggggacacagaggtcaaaatcccaaccatcctagggctctggcttttatctgagcccaaagagagatcgttcaggagaatgaataacctcctgccaggcccaccatgcacctgccccttcctccactggtgctgctggcgctgagctggggctgcatcagacccatccaggaccgccttgctctgcatggggcgcccggccagaggctgaatctctgagacccgagtaagagatgcctcctgcctcacatagagcctctccaaccctcagcctatcagaaagacccaacagaaagacagaaagattatcagaaacatgggcctatcagaaagacccaagacccagcatagacgctgggaggtgagtgccaggggtccctcctttccccagcctggcagcgtgggagttgcctgcggagccttctcctttgaagcctgagactcgggggtgagcactttgccagcaaacttacctgggttggtccctggccctacccctcatggctgagactcaatttccttcatgggagccacagtgctggtcagggagatgtggaggagataaatggggtgatgggtgcacgcccgacacagtaggaaccagtctgactcgctccttgctatggcattttgctcattaagaactggctgaaccctgactttgtgccaagctctgtggggaatacaagggaaagacaactcccattatccccacctttttacttctctctgtaccagagataaacaccggtaactccacaacagactgttcctgttcactacgtgagtccccaagcactctatttttcatgtctggttcacaaaaccttctatctacatgtaaagtgcttattttgtcacaaactccttggagacagtgagtctgccaggctcaaagtccctttagcttgaacaaaggaattggcctcaggttctggaaactatgctgtgtagagcgaggacactttcggaatccaggaggccatctggaaggatcccagaccacacaacggagcaacgtgtgtatccccatatctgcagaatgtgtgcatgactgagatcattaacagacattcccatcagagctgccccttccccggagatgggctctcatgcctcagtattttggggctgtttcctacctttgtccccttaataaacttctatctacttctagcagccactcaaatgtcacctcctctatgaagccttccttgaatgcccccacccagtggcctctgaacctgcagcactcggcagggtgctctgccttcgctccccaacagtgctcaattcccagaggacacatccacttcatactagacaaacaactgcatggagaccttgtctttgcatctcagcctcttaaatgccttgcaaaatgcctgactcaaaagtaggtgctctccaaagattgctgaacaaacaaatgagggaacctgggcttctccaaagtgctcggtcagtcagtggagtgtctgcaaggagtcagccattgatccaaagttcagaccaggctcagtgactgtgtgaaacactgtgttatagcacaatccttctgaaaactctctccaacttttcaaaatggcatcttcatgcctcggtaagctgtacaatccgatttcagtttctcagacaattgcacttgtgttttcagctgtcagtctgtgaaccccctgagcccggcactgataggtggccattagaacctgtcactaacatgaatatcaacactggcaagaagcatgtgatccaaagacgagagcaccaccggctccgagaagacctttcctcgcccccaatcaatactgctccgagtggggcctttgaagtgttaagaggttaaggaaatgccaagcctttggtccacatctccttgccacagcatttctgagctacctgtggtgaaaattcaatagctaagaccctcacgggtctttcttagaggttggaaccctgggcaaaggtgcccccaggcccaggtggcccctggaaaaggatatgattctccagcagatgcccagcttgctgtggatctccaggcctcgggcttcccgccgctcttcctccagctgcttggggtttgcaaattgccccttctccccaggggactccgggaaactctcaaagttgaacttgtccacttgaatagccattctacgagaaaggggaaaacacagcagagaattcatcagtagggcaatttctgccggctgttggagaatcagcacatgccagcgtgagacactataatgaatcattatcgttagtaattcataacggattcattccaagaaaatgaaataatagactcctaaggtggccctgacttcagagctggttcaacacacaatttggagctgaagacacagtcattgcttcaaacctctgggaagacctgtgttaccccagataaaaatttcaattccataacacagcaaggcaggaaagaaccagtgtgccatagatagtgagctggatggcgacttaaactcctgtgcagtcatggagaacgctgacaattatttaaccctggggatccatcagcccactgggaactgcctgtttatcctctgagtgctgtctgcctcctccccctaccatttccttctcaggccaggtgggcgtgcccctcccacagccccccctcagctctcatttggaacggttgcatttacccaatgtctgtacccctattgtatctaggaaataactagcttgtttttgattttacaggttcataggtggaagggacttgccttctctcagatgagactttggactgtggacttttgagttaatgttgaaatcagttaagactttgggagaccgttgggaaggcatgattggttttgaaatgtgaagatatgagacttgggaggggccaggggcagaatgatagagtttggctctatccccacccaaatctcatcttgagttgtactcccgcaattcccgtgtgttgtgggagggacgcggtgggagataattgaatcatgggggtggcttcccccatactgttctcagggtagtgaataagtcacacaagatctgatggtttcataagggggagtttcctgctgtcatccatgtaagacgtgacttgctcctccttgccttcatcatgattgtgaggcttctccagcaacgtggaactgtaagtccaattaaacctctttcttttgtaaattgcccagtctcgggtatgtcttcatcagcagcataaaaacaaactaatacaacaacagagggtttatcagtcaatggataagagtaggcgttttgggccgggtgcgacacctgtaatcccagcactttgggaggccgaggccggcagaatcactagaggtcaggagtttgagaccagcctggccaacatggtgaaaccctatctctaccaaaaatacaaaaataagccaggtatggtgatacacacctgtagtcccagctactcaggaggctgagtcaggagaattgcctgaaccaaggaggcggaagttgcagtgagccgagattgtgccactgcactccagcctaaatggcagagtgagactctgtcttaaaagaaaaaaaaaaagtaggccttttttttttattattgcatagattgtgctgtggccaaaacattcagcaaaaccatgctctaattggcctctgtggctattcccttgaacgagcaagaaataaggggacctgctgttaaggggatataaagacaagataagacccaaagaagtctcagtctccacgacagcttgggaaagaactactgcagtgccaataaatctctagtattcagcctgaggcatgacatgcggggctgagccacacaagagctagagacgctccccgcaagcagaggacagtgcttttgtggcaaaacatggtttttaaaaaaatcacttttactattattttctggttctctaagtagatagcttattgttaaacagttggaagatagaaaaaagcataaaaaagaaaataaaagcattcaaatattatactctaatgttaacatctttacagtcttttccctaagtatttgtatttaacatagtttaaaatcactacatatatatgtataaatcatgatgtatcatatacacaaagaaatacacccacatacatagtttgaagtcttgttttattctcttaatatgctatgaatattttcccatcgctaaaaattagtctgcgaaatattctatcttagggttgtatcatagcctacagaatggttctcctattttttggactctcagctcttttccaagtttaaaaaaaatgactattgtagaaaaagacctgacaaacatctttgtgctgagtgtttctgcctgcacttacgactgactctcaggaactgttcccagacatggagccactcattggagggtgtgaggtgtttcaggctcagaggccgagtcttccagaagcccatctccgagcagcatggacaggcctgtctccctctctacaccactgccaatactggcgatgatcagttttgaatctttgctagtaataggcaaaatgccacttcactgatgttttaatgtgcaggtctgaattacccctgaggtctgaattacccctgaggttgaacattttttcagaagcttactaaccatgtctctttcttctcttgtgagtaacctacccgtgcagcaagagcttctaattttccacccagcaaaaagctcctcttacttccccgcctcaaaggcagactgaagcaaactagtgctctcttcaaacaaaaggtcagaatatttcctaagtttcatgaaaaaggccagcttaagttcactgcttgataatccaaaaggaactaataactttcacctctcagttgagtttgacaacagtaccaggttctcttcctgttgaacacagaaaagagaaacagccagcaggcagctccctgggtcagagcacacgctggatgctgcggccactggaactacaacggtgtgatatctaatctgggggtatctttcaaacaatttctggttgagtaatcatcacactctattatcctcctccaaccttaacaaaactgtagctaactctgcccataaaacagaaaagggaagaaaacaaaatgtaaggagcacttgctgtgtgccaagcccggcgctgggtgttctgtgtgtacgctcatctttgttaacttacagccagcccagggaaggccaagctctgcttcatgttacagatgacaggctgcacctctgggtgcccaagccatctggcccaacatcatggagctagcaagcctcgctcagagcctgtgtcacagactccatcctctgtgttttgtcttgagctttacttggctctgctttgcttaggcaggacacctaaagagagaccatttcttgctcatgctgtttgcagagcagcatgggacagagaccctgaaactgcagaccctgcctccaacaggcctgctgcttgtgttaacggccaactgcttcccacatttacaattgccttctcctctgcagccctgggatggccgacgctggcaaaaatcccaaaggccgcgttccttttcctgcagtgacaaaactggggtaccaagaaatcgagtgactcacctaaggtcacccagcttcaagtcctattgccagaattccaagagccaaggatgaattccccaaaccacagaggggctctacctaatacctctatccacctctaatacttctatccacctggtcccaggcacagcccctaaacctgagccccctcctcctggctcctccccaccaggaagtgacggcagccctgtgactgttaacccggaaaactgcgagaggctttcccatggaggggtcctcacacctgggttcacccctgccggaagacactgctgcattgtgtgcagcagctgcaaggcctgcgtgatggaaggcgagagcccctggccggctgccctggtaggtgaccttgctctaaattcaatggcagcactgccagaactttgaatgagggccgaggccatcaggtttgaggcttgtcactcctgtggagagcagagctcccgatgacggtgggtggctggagagatgtggacggggtgtctgccccacagggagtgccagagggcatgcggggtggtggcgcttggctgagaggctcacagggagacgacccgcaggcagggacacccaggtgctggaaggtaaggaagaaacccagggccaccgaggggcacgaagctgagatcacctattgcagtcatcttccagagaggaagggcggaaggcgctgaggtgtagctggcagtggcctgtccatcgtggtaggcaccggggcagcagcgcagcgggagatggcggcaggcttcagagcccaccacctgggctggatgcccagctcggcttggaggtgactttggggcgaggcctgacacttccctgagcatctctgtggaatgcagtcagtgccacccgcacctaacagctgggagggtttgcatgttcttagcacccacacagggtctattgtcaccaggccacaggccacgatcagctgagtgccttgatggctccataacggctttctcaatgagcaagctacttttcataacaacaacaaagcaacgacgccttgatgccacattcatgccaccgccctcaccacttggcccccgcagcctcggaagcctgcccacctgcaggtgtggtttgcacaggacggcacatccctcctcgtcctgggtttaagcttaaacacacaggtgaggtcttatgttggggtcagtgacacatatcagagaatattcatgcaattccccatcagaaggtttccaaaaagtgactcggaaccgtggctgatgctctggcaagtcactgcaaaggggtgggaaatcattatctttggaaactgcgtggaaaaggccagtgaggaaacccgcgcagaactgacggcgaaggcacctgcctcgtctgcagcgggtgttggcgggaatggccttttgggcgggctcctggagggtggcggtggcggtgccgggccctgcccaggggtctgcccagcaaggtaacagctctttgagtgatgcctttttgctagagtgggttctaatgttattattttgatttttttttgagacacagtcttgctctgttggccaggctggagtacagtggtgcaatctctgctcactgcaacctccgcttcctgggttcaagcgattctcgtgcctcagcctcccgagtagctgggattacaggtgcatactaccacatctggctaatttttgtatttttagtagagatggggtttcaccatgttgcccaggctggtctcgaactcctgacttcaagtgatcttcccacctcggcctcccaaaatactggggttacaggcatgagccaccacgccagccttgtttcaatttttaataaagtaaggacttcatgctgaggacaaggcgtattacccgctgttcgtgtctgaccaagacaagaatctgggtctgggcccacagtccaggattctctgcagaacaggagggcttctgcggggaacatcagggcagagacatcttccctgaatgggcagaggggacaagaggccagtccttgccacagctgtctgctaacccagagagcaatctttggtcctgggctgggagctctgtgagggaagggctgtctgagtcacctgcgtctcttccacacaagccttagcttctctacacccaaacttccttttggaaaataagaagcatacttgttgggtcactggtcaccctgtgaggaaggggcttgtgcgtgtgaatgcacttggcactttgaaatgctctctagagattcgctaaagggaatagacttaaatcctagatggaggaaaggaccaggcccacacaaatcttccaaggcaggacttcaggggagcttatatttaggtcagtgcaattacttttgtacaggcctataaaacacacaatcaaactatggctcttctgggaggcttgtcccactacataaacccctcaagacactgtcctcctggaatagtcaccttcgctcacaattttaaagttcctcacaatgtgcaaaacacactggggtttagttttttaaatctgattgaggctgatacaccccactttgtaagattttgtgtagattagataagatagatggtggatacaaacggtcagcgaagcatccggtacataaatagcgctctataaatagtggctgctgtcatgattctgaaacccgcattacagatggagagaccaaggagctgaggcgctaaggagatgacctaaggttgcaaagtgaaaagcaaggccaaggaggggcttcatttcaaataccagatgcggggccggccctccatccactcctcggaacgcggcactccgcggcctcccgggtagacggtctccaccactacttgcttctgttcatctctgacggcagagttaaataaaattaatactattattgaatgccaattttcatgtttaattttatggccaaatgtgacaataatagtcaagagttggcactaaaaaaaggtgctgtgatttttgaagagtctataaaaaaatggtggtttttaaaataccagatcatatgattcagtctttgaacagcggatagcctcaccagggaagtcacaatgacatttaaatacaaatcaaggagtcggatctcaggaggctagccacatataattcaactgaactttcattgagagatagttgttagttataagactagctttccaaatgtatgtggtacatcatatgtgaatcgattgcctgtgcagaacaccagcctatgctgttttgcaaagaagtacgatgccaagtgagagggaagcagtcatcttcctgactcgtccatcctgaatgagaagggactttgagcagacaaggaaacggcgtgaacacggacgtatggatcacgccctgagagaggatcattttatccttcagcctcctagatcaattatggtaaaaaagagaaatccttcttcattattattttctttttttttttttttttttttgttgagacggagtctcgctctgttgcccaggacggagtgcagtggcgcgatctcggcttactgcaagctccgcctcccaggttcatgccattctccattctcctgcctcagcctcccaagtagctgggactacacgcgcctgccaccatgccaggctaattttttctatttttagtagagacggggtttcactgtgttagcccggatggtctcgatctcctgaccttgtgatctgcctgcctcggcctcccaaagtgctgggattacaggcttgagccaccgcacccggccattattattttcaattaaaggggaaagataagctgtattttgaaagtcaaagctctaggtgatccaatcaaagcaccatcggagaatgcaccaacaccaaagcaatggcgcccccgtcccccgggcctgctgtgggcccaccccgctgccaagcaacaggctcggtcgccaccgcctccatcttcgcagcagccctgggagggagcagattctcctgttgcagaaaataaggtcgcttgcccaaggccacagagatggcaaatgggagacggagaagtcaaagccaggctggcaggagccaggaacctgtggtaagcgttgactgaaagggtccacagagtcgtccccatcgcctgaactcgggcacacatgctgacaggtgcttggagataatactgctcgttgttaacaagcagcccagcactcccacagccagctgtggcccatgcagttaggggactgagagctctgccagaggtccgttctgcaaataaacaagctgtggcctggggccaggcagtctgtggtcctgttctttgctccatgtagggctagagaaaacactcaatgggagaaacttggggaggtgcaagcatgagacagagcctcgcactccttcaatcatggaagtctgtgattcgcaggcatcttgttttctgaatcttgagctcctcactgtaaattggaggttgcgtgaggcccattatttcttcagtttggattctgtgagttcagagaaggccaagggttggaagtagagtgagcatcaggaaacggtggcctcttgctgcagaggtggcttctccgaagagggatggtgtgctctgagcactctgcttcctcgatctgtcagcctggctggtctcccagggagggaacctgcgaagagcccccgaccctgcactgggaaagccccaaatacacagcttctcattttatgcttacggagatcctatatcactaccctcaggtcacagagaggtgcactgagttcatatgagtggaaattacccgccagtcaccagagcgtgagcaaaccggccagagcgaggggccctccccggccctcccaccacggagccggctccccttgccctttaggactcagccagacaccgccttccccgagcagtgctgttctcagcgtggaagtgcccgacatcgggagcttctccctccatcccagccagcactgctgtgggaagcacagccccttcgcttgcacttctccggatcaatgtttattttaggacctttaagtattgttttcttcagcgcagaaaatagtgcttaataaaatggaattcacctaatgccactggctgccagctgccctccctctccaaacggcagaaggcagtgcaagacctgggctcctcctgcaccacgggtcattttaaattgatttctttctgcagaggcctcctgaggaagcagtttttccatcttaacgggactgcttggcccgctgggtccaaacagccacaggtccagcaaaagcagggaggagccggtgcccggagcttcattccccacggcctctgacacacagcatgcagggccaggtcttggagtcagtaggcagagctcaggcgcccaccactgctctcgactccccgaggctttggcgcccgggctagtgtcccggctgcagggctgcattcgggaaggggtgctgtgccgaggaagggcatgggcttgcagcaacacggactggagcgcaaccctcttctcacctgtttgctttgtgaccggaggcaagtcacttgagtgtccccaggccttggtttttgatccacaacgtggatctcctatattgcagggctagtcgggatttgggagaattgatttgaaccacttggcacataattggtgctcaaaacaattatagctattataatgcttttgggagcaattcaaaagttttaaagtggacgacggtgatggttgcacaactctgtgaataaacaaaaatcactgagccgtacacttcaaatgggtaaattgcattgtgtgcaaatcaaatctcaataaagctgttattaaaaaatatggctattaaaggaagttatcatgataaagatcaaacgaggtagcttttaggaagacattttgtgaaggtataaaatgcaagataaatatgagatgttctgggcattattttcacccattgacctgtgttcataggtaacacttcactcaagctaatatcagggtgtctgcgtctccactccatccttaccttggttgtgtcagagctgttttcttcaacttggtgccccccatgctaccagtgtgtggcccagagcaggtgcggaggaccccatgcacaggaaggcagtggcttgagggcccaaggcagcacggtctccatgctccctggttttacccttcatgacccgctcagactccaggcgcggcatggcactgcccggacccttccgcctagtgctggaaccatttcaacactcttccagatttgttctgtctgtaacggtgggtttttgggttttctccaatgttcctcactgaaaattctgaagatgtttgtattaagattaaaatatctatcagattctttaccactggggcgcggtggctcacgcctgtaatcccagcactttgggaggctaagccgggcggatcacttgaggtcaggagttcgagaccagcctggccaacacggtaaaaccccatctctattaaaaatacaaaaattagccaggcgtggtggcgcgcacctgtaatcccagctactctggaggctgaggcaggagaataacctggactcaggaggtggaggttgcagtgagccgagatcgtgccactgcactccagcctgagtgatagagtgaaagtctgtctcaagcaaaacaaaacaaacaaacaaagattctttaccacttttctgctattcatttaaagtctgaaagacctggtttctgcctgggtctacttctaatctgccgtgcccttgggcaagtcaccctgtccctgagcctccctcctggtctgtaaagaaaggagccgctgcctacacagtggcagccaggagccagtgagtgacctacgtgggcccagggcagggcacacagctggggctccaacagggctcactccctcctgctttctgaattgtaatggaaaatcaactgttttgaagtttctctgccttagatgacagagaaccagagtgtttccttgcttttccaaagcgtcatgttcagctcacagtaagctggaaaaaatctgctaccacagcaactgcctaggtgaaggaactaggttcaggaccagcagcacctgcagaggcagctaagttacagttccacacttccttaaatgaaaagctggtgcattgacaaaatctcagctcctctcagttcctcttaggttcttctggaatgcctggctgaactcgaggagagaggtcaaggaatggcagtgtggtggtcacagagtctgcttctgcttccatcacctctgccacagatgtggctgcatcccacacctgccgtaacaggtctctgaaggtgtgggtgccacaactgggaggccaccctgccaagcaagcgggaccttggcagcccccatcacactcatgtaatttggatcttgcagcacagctagaggacactggccactcctgtgaaacacaggctgatggaaccactcggctgtagtctcctgaggccctgcagtctcaccataccacgcgactcctcccgctaatgtgtgagggcaggcagtcatcacatcacggcagaaacagggatgccgcccagggccagatctgagggcagaagcttgggacaaatcacactgggtttggttcagcagtgttcagagaacagctgtcatcttgcaggccctaaactcagtgcatggggacataaaatgaatcagaaacaagcccttatctttccaggagcttcagaagcccatgagagagatggacaacagagagccgggcttcatttgtgtaagctgtggtaagtgctacgatacagaacttttagcatgttagaggagtatgcagtatcaggcactgatcctgcctgagaagcttcaggaagagctggagagaagtgttgaccaagttaagacacacagtaaggggagctggcaggtagagggctgtgggtagagaaggaccatcccagatagagggagcattacttgcaaagagccaggtggactagtgcatgcaggccagccagggaccctggatgatcatctgagtggacagaggggccgggggagggacacagctgagaggtaagcaggggccagataagaaagggctatgggctgcattcaggtgcacacctgcccccctgctgccgcatccgagagcgcacacatctgccccctcctccccgccgcgtctgggagtgcacacctgccccccactgccacatctgggagcgtacacagctcaacccccgcccccaacaccagcctcatccaggggtgtgcacacctgcccctccctgctgtcagagaagcccacatggaaataaatgtcaaaggctagtgttcagaacataggaaatcaagcaaggtagcacagagaagaaacaacagaagaaagtaaagaacgttaactatagagagtgagaatatttactgttcgcaacaatcacatatgttaactcatttattttcatttccttccaaggttgatctttgaaatggtttggtgtttttttttttttggatggagtcttgctctgttgactaggctagtacagtggcacactctcggctcactgaaacccctgccccctgcctcgcaggttcaagcggttctcctgtttcagcctcctgagtagctgggactacaggcacgtgccaccacacccggctactttttgtatttttagtagagatgcggtttcaccatattggccaggctggtctcaaactcctgacctcatgatccgcctgccttggcctcccaatgtgctgggattacaggcgtgagccaccgctcctggcctgaaatgggttttgtcttcacaaagcagatgaggaaactgaagctcaggcaatgaagtgactgccaggagtcaagtctacgtggacacacaggacatgtcattccctgggcctccagacaggcatggctggcagtgagagctggggcagcctccataggagggcaggtgaggcagggcttcctcccccagttccaggtgagacgcggcccagaggccaaagcccaggacccagatctgaggttcccaaggaaaagtgcatcttcctgccttcctcacacagaggcaggcgagaggtaaaggacgggtccaaatccatcccgtggacactagacagagctgggacacgaagctcaggcccagagagctgaaggtagagagggaaagaatgaggaacctctctggccacttttgctcctggtatgtcattaaagcaagcaagcaagagaaattggcaggagtgtttttggcacctggatttcagaaacactgtggcagcctccctcatcaggctcatcagaaaccacagaaccagcagagtcaagccctacaacagcttttgtagaagagctgcagatgggccggactggtaagccagctaaaacacagtattagggtcctgggatgccatccgttccggaggtgaatgaaaatctactgagggacaccgtgcctaggtcatcagcctccatggaaataaacatccctgtataatcatctccccgctaagtggagctgaacctatacaagaagactacgttgcagcaatctttttcgacagaaatctttccatgttaagatgcaaatttcccttctttctacaggatgcctgcctcagtgtgaccctgtgacaacatgccatgggggctcaggtgacatgtaaaatgccatgccgtgggtttcttccggcgccccatctgaacacatgggagctgcacgggcctctgcggccggcattgctcgcattggtgtccccaccccgaactcacgtttcactcaacactctgctcctgtcattcccaagtttcagccccacctccacctggctaacctcatctcagccccacctccacctggaaaaattctccatctgctggcctccttctctccctgtgcttctagtggcttccctgacgaagcacgtctgaggaggccagcactgcacatgtgcagagtcctcagaagagcggagacagaaggtctgtgtgttcacctttctagcacctgactcaatgcctcagacatagcaggtattgaagaacaggctggtggaactaagaggcacccaaaagcctcctggagagaacgactcagtagagagctgactggttttaaggcagtgaaatgcccccattttgttaacaaaatgcctcaatcatattgaatcagtagctattagtttaaaaatgctattatatctaattacatatttcatcaattctaagtgaaatctcattttccctagattaaaggggggaaaacaaacaggaaaaggacatactcaaatgtgccttgcaaacaatcaacaaggtccatgccgagcacggggagggggcatggccaggaccccacaggccttcttgtcccaggccccagagctcagtgcagggtgacagagaagaactccagggtgtggagtcacagaaacccagactttcatccaagctctgcctcagtatcagtgtcatcctggataaatcagtcaagcctcttgaagtgttttcttgctgtgaaggtgaaggacaataatgccaacctgagagtgtaacggtgaggtttgaaaagccgcaggccaagcgctgggcacagagcatgcacctgatggccagcagtggtacctggcaacactgcttcccatggacgacaggagccctgcacctgacccggccacatggagctgaagggacagcagaggtcacagaaaatgccagaacctccttaggaaaggcattcaaagccccccaactccctgggcccatggacctctggttcttgcctgcatacgtgtaccacgggactgcatcctgcctgggaaccgtcaacgcaccatcatgctgccgggccctggcacaatcctattccagccaccaggaagccctgccttcaactcttagcctaggaatcgactggttcttcagggataagctccaatacagtctgctttgtaagccacctggacttctccccatcccacccccaggaaccaagccctcgctatacccatcagtctgtgctcacactttaacccatcatcagccacgcttgatggcactggtttctttggatacctatttcgtccacctccttcgctcctggaccgtgaattctacagagtgagggaattacatcttactcatcttttacaggcctagaactcaagggctcattacatgtttgctgaatgagttactggaaacggccttagatcacctgaatgactttcatgagcaggggggtcagcggtgttcagtgtggccccagagggtagagccagagcagacggcctgcagcggccaccagcttcgtgttctccagcacgaggggccaccccactacaactcacgcctcccactgcctacaggggaaagctcccgaaaagcacacaaaaacagctccctgaggaatccgggagtaaaacaaaagcagcagaatgtggaggagtcgacacatggaatgagctcgcccacggggtggcggcgcctcccacttttccctcgacctttcctccacagtgtggaaaaaaatgccctgttacagagcatcaggcaacagcactggaggccgaaactctaacagaaatatcgcctttctgcccaggaaaaggggtggagtctttgtaggctgcagagttgcatatggaggtgggggaatcttagaggcgagagagctagagaagtggaccctttcattctgcatagaaacctgcagaaatctcggattgatccctgagcaaaacagacccaaccgaacagtacaaagctgtaaaggccgggcacggtggctcacgcctgtaatcccagcactttgggaggccgaggcgggcagattgcttgaggccaggagttcgagaccagcctgggtaacatagtgaaaccccatctctactaacaatacaaaaactagctgggtgtggtagtgcacgcctgtaatcccagctactcaggaggctgaggcaggaggattgcttgaacctgggaggcagaggttgcagtgagctgagatcacgtcactgcacttgagcctgggcaacagaatgagactccatcttaaaaaaaaaaaaaaaaagaaagcctcagaaaacagaactggggtttgactacccagcacacgcacacgcacacgcacacgcacacacacacacacacacgtttcagatttacctctgagttatgtacaggatagacctcagcagcatgggaaagccgtgaaatgagatttgagccacacacgtgtctcagcctgactccccaagaggcacacgggtgggacagacccaatggtgtgctgcagctagctggttcccgctcccaggagccaactgttagcatctcttctccactcttcatccagtgacgtcacgtggatagcctgaaattgcccagaaggcaagtatttgcactacaaaaatcagcaaatgctatgatccaaggctggttgttaaaaattaaccaagtcacactggagagacccagaacaatgcagcagaggcctggggaggtgagcttgaggagctgagatgtgacctcccatcccaatagggccaggcagaacttaaggtctgaacctaactggactgaggacctgacaagacaaatcatcactattctccagaggctcccaagagaacccacagtctgcaaaaaataacacccacaatgcccaagacacaatgggaaactgacaacaggaacgagatcgattcagaagaacgaatgggtaccccaagatcacccaaatgctggagccacaagacagtctttaaagcagccgctataaccagactcccgtgacaaaagaaaacacattcaaaatgaagttttaaaaataggaatttacaacaaagaaatagaaaatataaaagagaggcaagtggacattttacaacttaaaaatacaatgaattaaaataaaaaaaaaaaaaaaactcctgaatagcttgaacctgggaggcggaggttgcagtgagctgagattgcgccactgcactccagcctgggtgacagggtgagactctgcctcagaaaaaaacaaacaaacaaaaacacctcctgaatggagaacagtagaatggaggtaactggggagagggtaagttaacttgaagatagacaagtcacaaaagaaaatattgagaaactaaactgcatcaaatgtaaaacttttgatattcaaaagcaaatcaagactgggaaaaaaaaatcacaacacattgattagacaaaagatttgtatccaagactatataaagaaatctcaaaacccaataatatgaactcaaacaacctaatgaaaaataggcaaaatatttaaatagacatttcatcaaagaaagtttcaaataatccataaatacttgggaagatgctcagcatccacagtcatgggggaaatgtaaatgtcaaactatcacaatgggaaacacccatacttgaacagctacaatgaaacagactgaccacatcaagcattggcagtgactggggtggaagaacgagaactctcacacactgctgatgggagcatgcaagggaatctgctattttttcttttctttctttttttttttagacagtctcactctgttactcaagctggaatgtggtggcacagccatagctcactgcagcctagacctcccaggctcaagcaatccttccactttaacctcctgagtagctgggactacaagtgtgcaccaccacacccagctaatgttttttatttttagtagagatgagttctcattatgttgtccaggttggtctcaaactcctgggctcaagtgacctgcctgcctcagccttccaaagtactggcattacaggtgtgagccactgcacctgacctggtctggtagtttcttagttatccacagacctatcatatgggccaaaatcctactcccagatattcaccaagagcaatgaaaatacgtctatgcagaggtctgttgaggaatggttatggcagctttaatagcaatagccaaaaaagtagaaacaacccaaatgcccatcaacaggcgaatgcatacataaataatggaatactttaagaatgaaatactcaactacaaaaaggaacaaactattgttgcaggccaaccacgtggatgaatctccaaaccattgtgctgagtgagtgatgtcagacaaatgcaagtcctcactatgtgatcccatttatataaaatcctggaacacaagagctaatccacggcagaagcacgccaggggttgctgtgggacagactgcaaaagggcacaaagaacttttgggggtgatagcaacatttgttatactgaatgtgctgaaaattccttgcgtatagacacatatcaaagctgatcaaattatacactttaaatatgtagggtttactcttccacaataatccttctataaagttgtaccaaaagacaagccctgtgaaatatctccccaccaaaactgtctggctctaaaccactggagaagtgtgtcttctaaagtcagaaacacctcggtttgggttgggtacagtggctcatgcctataatcccagcactttgggaagctgaggcaggtgaatcacctgaggtcaggagttcgagactagcctggccaacatggcaaaatgccgtctctactaaaaagacaaaaattagctgggtgtggtggtgggtgcctgtaatcccagctactcaggaggctgaggcaggagaatcgcttgaacccaggaggcagaggttgcagtgagccaagatggcgccactgcactccagcctgggtgacaaagtgagactccatctcaaaaaaaaaaagaaaataacaaaagaaacacctgggttcaaatcttaggcctggcaagagactgaagttccttgacctcaaggcctttgtgtgtacaatggaaaagcccacagcatcgaccgacctcagagctgctgtcggtactgggtgagtgcgtggctgggaggtctgtcccagccctggaggtgacgcattctccacgccatctccatgcttgtgtgctggccacagtgtcttgccctctctccactcctgagagttccttcctgggaatcccaaggcaccgtacagtctgtgtatggcgctcacagggtcttgtctcacccttttgtgggtgcatttttatctctaggaaaccacaggtgtttggagaggaagaatgcatcacagcccgttgattctccacagtcccttgcatcacagtctgttgattctcctcggtccctaagacaacgccttgcaagcatcacgcccctcgatgttgcttacgggagacgtgtgcgtgggcgcgggagggtgcccaagctggtgctgtgcacgccaatggcaatcccatcttgtggaaaatctatgactagcaaatacttcacgaaatcgggaattatttttagttctatttgtttaaaataaagaagccactctcttaaaaatgtattaattaattaattaacaagcttctacattttaggttttatatacttttctgtcactttccctgacaaagtcacacaggtaggaaccatgactgtcacattttaaacaacgatgtctctaaagtcttacaaagcacagcacagagtggatgatcaatacatgaatctactgaaagcttggggtcaccaggataacagataacgtctgatacatttgagttaagacaaggtgccttgaaataactttagtgcaatgccgttctcaaacacagcagtggtcccaggcttacaataaaaaaaaagggagggggccgagcgtggtggctcacgcctgtaatcccagcactttggaaggccgaggtgggcggatcatgagaaaaaaaaaaaagctgagctgtcctgtgcttcgggcagcctcagttcttggctttggttttctctccacacagagttaccgtgctgcctgctgcttcttcctgagctacaggcttccatggtcttccagaagaatactgtcctcttctgaaaccatgtttctgcatatgccctgctgcttcaggaaccatggtgccatgcacccgacacataggtgtgtggggagtggactcaggtcccttggctggtcacccagcaagcctgggcagcgctggccaggtgttcaaggaaggcccagcagagcaggctaagctgggatgggcctctggggtctgccctccccacctttccatcctcatctccagcccagcccctctctgcctcagacccttccatgtcctgtaaaatggagcaagcaccaccttgtaggtgcagtcctcaggagcagcacctgacacacagaaggccatcaatatacgtgtttggcactgtgcgtggattctgccgattctctacacttctctgttatgaacaggtaatttaaagaaaacattgagcatcgtgaatggcatatgctaggggctgaacaagcataacttcacttctcttatttctgggacctcccagatgcctaagaggtgacagccaagggggtgacactcaggaagagctgagacccttaagccttctacgcactatcttaatgcatgtttacccctccatcccaactcctgagatgggaaggcttatagtgtggggcagtggggctgcgccagccgggagttgatgtgtaacgtgaacaagatacagccaaggtgagcagtggcaaggccagcgcgctcacacaacacggttctcgccagtcaacttctcccgtggtgtcggtagggcaggtgggtggctcaggatcacagggaaaacaagggggtcgatgactagagccaagccttggaaagggacttctgttctgctttccaagcagcaatgctcgcatcagacaggagatagtcacacccctcttttttccatcctagacatcaaacagacaaaatggtaccagtgacagattaatattcaaaggccatcttgatccttctagacccgtcaaatacaataaggagcatcccccgtgtttagccccatggaggagggaacttattttgcaatgagatttcgttttcaaccaatcctagtaaccggccttccagagctggagctcccttagaaacccagcctcattccaccgctgtctcatagatgagaccctctgaggagacgctcaaaacagggaaggaggcgaaaacggggccacccaagggttatgaggatgaaatcacgacgacagcaacactgttgagtgctcagtgtacgctggacacctgcattagctcattgactctgcactcggtggtgccccctttcataggtatggaaaaaggcacatgcagggtgcccaccctgctggaatcagccctcaggtcatggagcctgttccctgtctgtccaggaagcaaccccgaggccctggctcttgtcctcccacctcccaaactgccccaaaggggtgaggaaaagagcttctagatgattctaaccccacctctataaccgcaagctgtgagatcctcgggaaacacttcgacctcatgaggctcagttttctaatctgaaaaatgagaatattaaccatagacaactgccactcactgaacaccagctgcagtagagccgagcatacacgtaatcctcaccgcaaccataggagctggatcctgacatccccatctcacagaggaggagactgaggttaatgacgtggcaaatatccacaatgacagtttctgcaagtctttcctagtgcaatcacccacaaccacagccctagaaagaaggatgaacactcttccacagaggctggcacgcaccttaaggcaggtgcccactggaaccctgtctgtggtgtcaaggattttacagttgaccttgaagaccacctagtccaaagctctcattgtacaaaaagccaagcccagaggtcacacaaagctttggacctgagcctctgggccccgcggtctggaaagtgctcctttctctgcatgctacggggctatcaacttgagctggtccagtctgcagatctacatcctgcccgcctgagcagaggcgggtgtgggaccagtgcggatctccacgatttgtcagcccatcctgataagtctgaggctctgaccatcatatctcatcacagcatcattaggattacaagtgccatgcggtagaagaggaagggaaacacgaacaaaaggatgagaaattaagcccatttcacccggaaaagatgactctgatttattgctctatagcagctgacgatggcctgtcagagaaattctgtgttgaaaataaagaataaaaatcacccagagttgttttgccacacatccaaattagaaaatgctactctccggatgatttatgcttcaattttttcccttattcacagagaatttgtccagcattacaagagcacctaagagcaataatacaattcaaaaggagatagaagaggccgcagaggtgttgatgtgcggctgagggcggggtgctggcccaaaggcagggctttggtgctcagaagcattgaccttacagggaggaacaaggagaaaccagccaggcaggccccgcaggcagcccacagagccacttcgccgtgcagccgagggagtcccgcaccacggggcctcgctcagggtagccaccatgggagaatgtccccacctcgtggatgtcaggcttggccacaggtccttggccacgggacctgagcagagtgacatatgccacactggatcagaagcacgctggaccaccacgtggtatggctccctttctttctcccgtcataagtacaagatgttggctgacctgactcctggggtagaaatgtcatgtagacactgggcgcggtggctcacgcctgtaatcccagcactttggaaggccgaggcaggtggattgcctgagctcaggagttcgagaccagcctggacaacatggtgaaacccgtctctactaatttacaaaaaaaattagccaggtgtgttggcacatgcctgtagtcccagctacgtgggaggctgaggcacgagaattgcctgaaccccagaggtggaggttgcagtgagccgagatggtacctctgcactgcagcctgggcaacagaatgagactgtgtcttcaaaaaaaaaaagcactgtcatgcagggcagggtcccaaggccccagccaacctctcgttgacatgtaatgtaagaagatgtcaactcatgcttatagtcactgacatttaggaatagtctgttaccacagcataagctggtaaaaaaaaaaaaaaaaatcatacagctcttcttcccggaacgcccctgcacctctgctccggtgcacaaatgctttctcttcaaggcatggcgcaaaaaagccactacttccagaagcatctcctcattccccgccgggagcaacatctctcttctcgagaccccagcccctccgctgtctacccatggacttcctcagtgtttgttttttgcatgattctttgtgaccaagctgtttctccagctgccttgaggacatgccctagggaacagtgctctgaatcgtacctggattctgtgcctacctgctccatctaaagcagaaaactccacaactaagatctcttctaacatttaaggaatagagcctaattagcgcatgaatacgtgttgaactgtgaatgaatcaatgagtatggaaactacattatacgcagtgctgatagaaccaagttgccaagggagatatcatctctcctgcaggaaggaagtcctgcctcccactgatccactcagcgcacagccttgaacaaaacagagcaagagttataaccttcagatgtgggggcagaataggacccatttgggcagacacaggccacggaaaccacagggccagcgtcttgagccctcgatcagacgcctcccgcccaccgcggccgcttctccacgcttttgcccagatctctgcaccgcgtggcccggtcttgcctccctgaggaccacactggctgcaacccaaactcgactcttctacttacacttgctcagcatttttgtcatccctgcccttggccaatccctgtcttggtttctgctcttcccacacaaagttttgggaatcaattcatacatatttgagattaaccaaagtccatgatcagttctggaccgctatggattccagatccaccttacgtagccgtgtgagctccggtaaattacataacccatcaaatttctttatctataaagcagcaacaataatgtcacgaaggattaaggtaaagatgagaaatagtatagcaaaagcatctactatgctatgtggttgctagtaggtgtcatctattatttataaacctacatgatcgtaataccatcctgtccatatttctccatccttagctgctactacgttatagaaacctctgtgagaagttatactcagcagaattcatttttgaaaacaaattttttgtaaaacaggttaagctatgtgattgccttcattcattcaacaaaatgctttgtgtgccgacactaacagccactgttttaggcaaatgtggttgaatccctgacttcaagtccaatcagagagagacagagagattaggcaaatgtggctgaatccctgacttcaagtccagtcagagagagagagagagagagagagaagatgagagtagctgtacgcacagcaggagcgtgcacaggctacctggcaggggtgtctcctgtcattacagttagcagtgacaataatgacaaatattctaccaccatcaatgacaatttgcacagacaatggaaaacctgggctcttgaaacttcattcttccaatctcttgtaggccatgcactgctgactggctttcctggtgctatttcagtggtactcatagtgtagagagagttttttacttaatgatcagcccctgtctgagtcatcacttctaaaccgctcagcaattctctttcaatcctcttccaccttcaggaaactgccttccatccgccgaggaatctccaggctgcacatgtggccacaggaggccccatccctgcagactggggaaggcgcgcccttctgatcttgcaagtagacacatggggcccaatcgcaagggttcctcggtcagtgttcgctcagataggggacatggctctgggcaggacagcgctggccaaaggacgaagtgactgacctgcagccactcagactctcagacttgagataggagccccagcactgccaagtcctacttgtgggctgggtcaaaccaggttagctttccgaggtcttgccaggacacctgcttcccaggcttgttgtgagaattaggcaagacaatgttcacagagtctctggtacatcacacggagaagacagaggaccacaggtattccctaggagacctgtcacttcactgctcaggatttcagcccctcccggtacgtgatctcatgggagccccgaaagaccagacaagacatcaccgtgcgagagaaggtgcatggtgaatgaaagcctactgatgtctgcgtgcaggaccttctgtcctagaaccccaaaatggtagactcgggggttcttcaatgtagtggctgccagggaaggagaggggaaagatttctaaaaaattacacgtgcttttgtgtttgggagctctcgcgtatcctgtctgcttctcagggttacagggtgacctgccagctctgagacctttgactatttcctcacctctctgggtctcaatttcctcatctataaaataagaaaaaacgtctatcccatgacgttcttacaggaattcaatgagagagaatggactgcgtgtgcagacagtcccaggcaagtccatgaccagtgtgtttgagtcctcccctccctttctagctccttgcctataaaaaagagagaagaggatggtatctagcttccttcccagagctccaagctgggaaacagggatatgatatgatatggcatttttgtgaaaagcatctcttagttaaaatatgcttcttcagtctttgcttttttttttttttttttacatttgttctaagctcaacttatttgccgtatgaactcgggcaagtcacttgatgacagtaacaaaagaattattttgctattatagcctaccattatttagtgttttacaatttaacacaacttcagaacaatcacctcatttcatccatacaagaacccttcctcattcaccgatggggaaactgaggcacacagatgccacactagtcacccaaagggatggagctggaaatgcagtgtcaggatggcatgtgacctttcctgctccagtcccacaatggggaagcctgcaccatgtggggagggccactcctgcccagggcttggggaacctggtgcgagcacaggcctggagtggcgtcacatgctcacgctgacctccacctcacctgctccacgcctgttggcctctgaagactctaaaactcctcacctggattcccggcatccctaactccggcccttttgagatagcgcctaccagagcccaggagcgccacaggccaacaaaccgtctagcacgcaccatcacagctcttagtcctgctgaaggaggatttagagatggaaaatcccaaacacctcctaaagtgatttccgaggcaggcagtgcgcttcttcattcataacatgcatgctgagtgccagctctgccaggagcacaaggccacatgctatgaacacaaggacaaaggaagcgcagcccctgcaatcaggcacaaatggtgagtggggaggtcgacacctatatgcggagctgtggcagacgctgtaccagagctgggagcccatccagtgggagcatggggaagtcactcggcttagagccttctaaaggtagagcagagccactaggcccctgagcaagggcagggcaccccaggacgaggactgagagctgaaaggtaagtgtgtggcacacacaggacgagtgggcactgagtgtggtgataaagcagggagagaatgggggagcgggcaccacagtgtggtataaagcatggggagagtggggagtggggactgcagtgtggtataaagcagggagagaataggggagtgggcactgcagtgtggtataaagcatggagagagtggggagtgggcactgcagtgtggtataaagcatggagagagtgggcgagtgggcactgcagtgtggtataaagcatggagagagtggggagtgggcactgcagtgtggtataaagcatggagagagtgggcgagtgggcactgcagtgtggtataaagcatggagagagtgggcgagtgggcactgcagtgtggtataaagcatggagagagtggggagtgggcactgcagtgtggtataaagcatggagagagtggggagtgggcactgcagtgtggtataaagcatggagagagtggggagtgggcactgcagtgtggtataaagcatggagagagtggggctggacttcaggctggaggggagcaaagtcagaccataccttgctgcatcccaggagggggctgctttagccccctgtgtctacaggacattgcattgtgttcttgaagagtaacagtaaaagctctttttatattatgggaagaggcacagaagagtgaacacaaaacgatcccaatttggtgtgaatgaagtaaagtagacacagatagcaatatgggtgcgggcccagagagggaggtattctctctggatgctgggattccgtgtcatccaaacattattttctccatacttttccttcttttctaaaatgaacacatgttatttttgtgggttgggctgacatctcaaagaagaaaagaaatccccttcctaggagcccaaggcgctgcggggacagcgctgggggcagcggcttcaggagcaggcggaggctggagggccgaggtggcagggccggtgctggggccagtggggccaggagagagggaggatcaatgtaagccaacagagagaccagcgtcgtccacactggaggcagcaaggagaggaagggaagagaattagaatgaggcggttctggaagtgctcctggcagacggcagggcagtgaatgaaaacacttggaaggcgcagtgtgaagcggaaatgcggacgcaaatgtcacgtattattaccgctgccgccacggtttctaatcgcgttaaacatgggtaatgaagccttctctggccagcgcttgacaaagccatcgctgagcagctgccaccagggctccacacacgctctggtgcccgctgtggctcaggacgccgacaggtgaaatgcattaccagatgcacagagacacctcctcagtggccctgagtcttcggggatttgaaaacagagttctccttgtgggagatcaactcagccagaaaaatcttttgggtgtctggcttaatactgaaaatgccacaaccattgaaatatgaataggagaatgtctgtaatgatatgaaattgacaattagggataagaaatacattcctgcattgaaacaataaagcagcagcctctctccacccatggcttcctggcaggtctttgggaacctgacaaagctgccccacctgtgtgtcaactcagccgtccctatgccgaaatcagatagaaaaccacacagtcagtgggtcctttgaaacagtctatctttattttttttttgagacggagtctcactctgtcaccagggctggagtgcagtggcgcgatctcagctcactgcaagctccgcctcccgggttcacgccattctcctgcctcagcctcccgagtagctgggactacaggcgcccaccaccatgcccagctaattttttgtattttttagtagagatgagttttcaccgtgttagccaggatggtctcgatctcctgacctcgtgatcctcccgcctcggcctcccaaagtgctgggattacaggcatgagccactgtgcccagctagaaacagtctatgttaaatgtgcaattccttgagacacacagagctatacccgattaatttttttttttttgagacggagtctcgctctgtcgcccaggccggactgtggactgcagtggcgcaatctcggctcactgcaagctccgcttcccgggttcacgccattctcctgcctcagcctcccgagtagctgggactacaggcgcccgccactgcgcccggctaattttttgtatttttagtagagacggggtttcaccttgctagccaggatggtctcgatctcctgacctcatgatccacccgcctcggcctcccaaagtgctgggattacaggcgtgagccaccgcgcccggccccgattaattttttaaggccaaaggagagaaataagacaattgaataaagtgccatgtcctcagattcagctcctccattcctccctgccacttgacagacaggagggaatgcccactgttctccaggcgacaggcaccaggacacaagggccattcaaacatgacttgtactcaaagaactggccagacaagtgagcaggcaactccaccatacttcgctaagggctatatttgggggacatttgccatgggagccagagaatgggtgaaagcccagagtccaaggaaggtcctggaagagataacacctctgctggacaccggggtctggagaggtcaaggagcataggagccagggccctgcggtgagtggacaacacacagcaagaggcgtggcgggcaggtgccagcacctgagagggggccgggaagcggggcgagccagagagggcagcccctggcgagtgaggaaactccagaaggaggtggtccagcacgccgcatggggctaaaaggacagagcctccccaaccgagaccctcagcccaccctcccagtccccattcccagggcaggatctgctcccaacccgtccaggtccacaaaggctcctgtttgaagctgcaggcctgcaggtgtgggaagcacccctgtcgtggggctgatgtgcatcctggcagccccgtgtcccaggccaccccgtcgctgggggctctgtgcctccctctggtccttttcagcaagtgctcccaccttctgtggctccacaacagcctggtcacatctgatgatggcttattcagtattgcccaaaacagtttcagttcctaagtcctagaattggaaagaaatctctaagttcagaatggcaacaaaaatgcctccagggcccaggaagagagggaggctggtgcagaggcaggtgcaggtctcatctgcgggaaaggcctgcccctctggcagccaggccacagcatgcggctctgcacagctccagctcctgatctctcgagagaaccagaaacgagattgaatctgaaattcctatatttttacaatgacagctcaatttgttgtttcttttttcaccctaggcagcccaaatatacctgcgagctggactgggcctgctggccacacgtctgggattcccgtcgtttggttggaacacatcatcatcagttcccctcacccctgtcttacaggatccgccacggcctccaccctcagacacaaggagcgcaggtgggttactgcccccaagtctctcttacttctgaacagttctggcagtcaagtttttcttaatacatcttctccaccatctctctagacactgacacaaattactagacagagaaacagggaagacatcagatactgaagtttgtgttaattggggagtttttgctatgctctattccaacaaatattatcatcatcatcatcttcattttcaatttcatactgtgaaaaacctcatagtgccagaaggaatgaaatgaaacataatgaaatgggggggattttaaaaattgaaaagcaaatgaatcagacacatagctagagtatatctgctccctccttgcagaggcaggacgtggagagcggcagccccagactcagcagagtcacaggcctgggctcaaaggtgcagaggggccggcagggacacagggcaggggccacgctccagctaggccaatggcagctccactgtcacccacagaacttcctccaagaagctatgaccaaatcagccagagaggagccacaggcaccttggccaacgtccctcttcctccttccccacctcatggccgtacagagctttggaaattaggagccaaccacagcagaggtggctggaaccctagggagggatgaattcactcttccacacagagggaggctgagttccggcagggcgctgggccagggtgaaggggagctggggaaggggacaaggctgtgggtgtccccaggcatctgcgatagtaaagtgcataagccgggcacccacagcagcctatgaaggggggttggggtagcatctcccatcactgtcctcactgggacatacctggggtggacccacatgattggttctgtggcaggcccagaaccccttggcatgggcaaatggaaatgcctgtctgggcctcagctgcagacactgaagaacagggcagcagagccttgggcaggcacgattggctagtcttcagagcgggtgggcatcctccccggccctcagccttcacaggaggctgccaggtgagaagggtgcagtccacacgcaccatgaccaggaccctggggctgcagaagcctcacagggaaacaacagaggccgtcagagcagaagtagtttgtccacttccctggagggccggcagcccctagccaggaagtggggctgagatgctgccccaatgcccagaagtgaggattcagggtggggccctcttactgtaggaagaggctgtgctctcagttgcaagactagaagagtaggagtgaaaatgggacacagagggcccagtatggcaggagggcaggccaggggctggcaggagggcagtcagtgccctcatcctgtttagccttaacaaaggcagagagagactgtgccaagtggtaacatcaccatccaattcaacagcacaaggaaaggaattttccaaggctagtcacaggtatctacaacagactggtttgcccagacagtgtgactgtaactgtggcaagccagtgctcccaaacacgacaaatgcaagcatttcagtgaaggtctcagggcaggctggccgagcaggaggcaggctgggcagagggcatattccactctgcacccctgggctcagtctctggcccacatgggctccgggcatgggtttgccacactgttctgcaaacttcttcctaaggcaaatgggagacagtgccagagcatatctgaaggagccccatggggagggtccggcagatcggtgtgcaggaaggacagagacacatgagggtgtatgaagaacacaggctccagaagcaaacccatctgggatggaacccagctccctccactaagtcacctaccttctcaagccttagtgtccttttctgtgttttacaaattaaaagactcgccttactgatttgtgaacactgaactgggctgacggatatgagaacactttgtggacggtgactcgggatggtaataacagggggcggccacgtagcaacccttctctagttctcagcaagggtgatgacatctccgcctgctgagcacgagggttctccctcattctggcattttaccttcctagggtcggttaaggaatagacacccaatagttatttattgaatccctgggcattgacccaaaaagtgttcttatttggatcagaaatttggtcattggtcattttatttttaaaaaaaatcatgagaatcttaagagcttctaatggaggcaagatgctagagacagaatttgagaaaaaccattctcaagacacctgagaaaaaccgtcatccccagaacttcttattggtgcttaataggtgtaacaagagttccacagtcagataaactggggaagcgtgaaagttggaaaagtagaaaagttccagtacatctgagcaagctccaaagcctcctgcaaataattactataaattctggacacatttttttttaataagcaacctgaaggcactggcaggaaaagaaaaacagacatagtcgagagaacagagaacagacacccggaagaaggaaaaccacggtgccaggtacccttcctttatgacttcttgtctgaggacaggccgagtcagcaccacgtggaaacgaaagctcggggagagactctgccatcttccttggccaaaaagtctgaagacagagtttggggcaaccacagcaagggaaagggagggagagttcaggaaaggagagggccgagagcaggagtccagaatgttgtacatagaatctgcccagagctttggcttactcctgaacctggtgtgcatggagcagagtcagtgaagtccagctaaggagaaaagaacaaaactgagattcgagatgtccaagaggtagaattttgtttttcttttttaaattgagacagagtctcattctgccatccagactggagtgcagtggtacgatgtcagctcactgtaacttccgccacctgggttcaagcgattctcctgtctcagcctcccaagtagttgggactacaggtgcataccaccacgcccagctaatttttgtgtttttagtagagctgggtctttgccatgttggccaggctggtctcgaactcctgacctcaggtgattcgcctgtcttggcctcccaaagtgctgggattacaggcatgaaccactgtgcccagccgaggtggagttttcaattacagtccaacaaagataaacaactgctaaataataattttttaaatgaactctctccaaaggactataacaaaatccagagactccacacataagatgacaatgttcaggatataattgaaagttaactgacctaagaagaaccaagaaactgacccatccttaagagaaaagacactcaataaattgacatcaatttgagagaatacagacgttgcaattagcagacaaagattttttaagttattaaaactatactccagaacattattgaaaatactgtggcaattcaggaaagaataggaaaactcagcagacagataaaaattactttaaaaagtggaaaagctaaaactgagaaatagagtatctttaataaacaatgcattggataggcttcacagaagaatgaaagtgatggaggaaagaatcagtagatagaagacaggtcaaagtaagtcatccaatcttaagaagacagataaatgaaacatgagcagctaggaaaaaaacaaaacaaaacagagcttcagggacctgtggaacaatatcaaacattctaacatacctgtccttggaggcacaagaatgaggccgaaaaacacatgtgttcaaagaagtcataaccagtatttcccctaatttggtgaaaaacataaatgtataatcttaagaactttggcaaaacccaagcagaataagggaaaggaactttcaaccagaattctatatccaatgaaaatatccctcagaaatgaaagcaaaataaaaacatttcagattaaagaaaactaaaagaaattatcaacagaagtctccctttacaagaaatgctagaagaaaattcttggagttacaggaaacgagtaccagatggaaatgaaacttggctatttaggtaataatgaagaccatcagaaatagtaaatacttgggcaaatataaaatattgttttcttatttattttaaatacagatgacttcttaaaacatatcattatccttgtgtgatttataatgtacatagatctgacacatttgaccactatagcttcaatgacagggcttagacacaggaaccgatgtggttgcaaatattctatattttatgtgaaatgacacaataataactttaaatagaccatgaaaattaaggttgtgtattgtaatcccaacagcaaccactaaaaacataaagaggtataggtaaaaagctgacagataaattcatatgtgaatatgtaattcatatataaatacatacatatatgttatatagaattaaataatacaaaagatggcaggaaaagggaaacaaatgaataaaaagcagtggggtcattcaggaaacaagtattaacatagcagacttaaaccaaataccaataaatacctgaaatattaataaattaaatactcttaaaagacagagattgttacaatagattaaaaaagcacgccagccatggtggctcatgcctgtaatcccagcactttgggaggccaaggtgggcagatcacctgagatcaggagtttgagatcagcgtggccaacatggcgaaaccctgtctctactaaaaatacaaaaaattagctgggtgtggtggcatgcacctgtaaagccagctacacaggaggctgaggcaagagaatcacttgcactcaggaagcggaggtttcactgagccaagatcatgccattgtgctccagcctatgcgacagagtgagactccatctcaaaaataataataataaagaaataaatagtaaaacaaaaaaataaaaaggcaaaattcaactatacgttgtttataagtaaagtactttaaatatgaaaacttatgcaggtttggagtgaacggattgcaaaaggcatcctttgcaaatagtatgcttgtattaccatactggagtggttatatcaacatcatatgaaatagacttcaagacaaagagtatcaaagactcatcattgtccataatgaagtgaagtgaatccattagcaggacataatactcaccaacatatgaggatacaatcaaagaacttcaaaatacacaaagcaaaaactgacacaattagagggagtcagacaattccacaatcatagttggaggttttaagatcctgctctccacaattgacagcacaattagcaaaaaaaaaaaaaaaaaaaaaaaaccaacaaaaaacagtcagtaaagacataaatgaactgaacaacacgtgcaactccagagctggtgtgcagacagcactacagcaaacaacttcaggcccacgtcctcttccagtgcataaggtgtgctcaccaggatgaagctcatgtgggtcatgagacaagtctgaatagatgtcaaatgactgagtgatacagagtacacattcgactctagtgaaggatgtatctcccttggttgttaggggaaatatactgaggtttgcaatttattttcaaatgcatgaacgaaatatgatggactaacagatggataaaaaggtggatatagtaatagacactcagtaaaggaattatagcaaaatagtagtggtacaatcactgctgtacccaccacctagatttaactttgctgtatgtttaaaaatctttacaattaaaaacatttctaaaaatcaactcattttctgaaatggaagacttctcagaatccttaagatacaaatgtgtgtggaaatccccaaggggggaggtggatatgcggaattttccaactgatctctctcaagaaccaacccccaccccttttaaggaagatctcaaagaaatcgaggctcaaagaccctcctggtgtggtcaaataggccctagcaggctttatgccaggcaaacctgatctttattctaatttcactgattcctcactgtggaattacttcatctttctgagtctcactttcatcatctgttcaatggggctaaaaattgcatgcactcaatggattccgtaagaacgaggcatggccaggtgtgttagaagccctcgtcaatggctggtatatagcaggcgcttgagaatctacactgaccctctctcccttgtcctctggagtcgggagtgacatgcttggagttttgcttctttgctcttcctctagcagtgctatttaccatgaatgcttatagaggaaaagaagcaggaaaagcaagcatttagcaaggtatggcagtgtctcaaaggccagataataaagatgttaggtggcagcacaaggggaaagaagaggcaggtgaagagatatgagagtatccgcagaattttcttctaaaaaaaaaaaaaaggccctggccaagagcagtggctcacgcctgaaatcccagcactttgggaggccgaggcgggtggatcacgaggtcaggagatcgagaccatcctggctaacacggtgaaaccctgtctctgctaaaaattttaaaaaaaaaaaaattatccaggcatggtggcgggcgcctctaatcccagctactcgggaggctgaggcaggagaatcgcttgaacccaggaggcagaggttgcagtgagctgagattgcaccactgcactccagcctggacaacacagtaagactccatctcaaaaaacaaaacaaaacaaaaaaccaaaaaaggccctggctgggaaaagaaaggttttcacaccctgcgtaaggaaatggagagagaaatgagttggtaattaaattgcagggtttccatgcaactcacctggcaagtcaaataagtagcgtgttgtagcaagacagggtggtatcattaaagaaatattagcatgatagggaacagaggaaatgaactacacgcgcatttcttctgctataaatattctcacacttcagatgcgagtgagggattcccaccattttcataaaccaccaggtactaatctccatcaacgccaccaaatagcatttaacaagagataatgtggttctgtagccagggcaggctgcaggaaaagcaatgctgtattactcagccgccgggagcaaaggacagaagaatgacaaactaaccaggacaaagtatgaagaaaaatagacctttgttatatatgccaatatctcccttgctttaatttaaataaggctttgttttgtccttgttgaaaagtagaataaagttcttattccccttgaaatcttgtataattaaaaatacagtattaagggccaggcaaggtggctcacgcctgtaatcccagcactttgggaggcctaggcaggtggatcacctgaagtcaggagtttgtgatcagcctggccaacatggggaaaccctgtctctactaaaaataaaaataaaaaaaaattagccggtcatggtggcgggcacctgtaatcccagctactcaggaggctgaggaaggagaatcacctgaacctgggaggcagaggttgcagtgagccaagatcacaccactgaactccagtctgggccacaagagcaaaattccgtctcaaaaaaaaaaaaagaaatatgtgtgtgtgtatatatatatatatatatatatatatatatagagagagagagagagagagagagcgagagagagagagagagagagagagtataagggagccaggagaattgacagcacgggattttgagtccaacagacctggattcttgtccacgttctgtccactggcacttgcatggccgtgggaacattactgacccaccctgagcctcagtttccttatctgtggagtgcgaatcataagccttgcatcacagggtccttgagtattaggttcactctttcatccgggaactacgttgtaccaggcactgttttagatggaagggaaatagaagcgaacaaaacgaagagccctccttacactgagtgggggaagatggttcataaaacacacacacacacacacacacacacacacactgtgacgtacagatcctagcgtgttccccatgacccctgccctggtgttcacaccctcccttttgtttttgccaatataacggcttcgccttgagtaaggaaaagagaatcccagggagcgcagacagcaaatgctgatgctctaaggctagaggacatctgggaaggtcagaagacatcaaggaagccaatgtggctaagacagaggggcaggcaggagaggccacaaattaccaggctggcccgatgcccttctccctaagttttgttcattacggcagccccttcctttaggaggagccccccaccctacctccacctccaccttcaaatgtaaaattcttatcaaggtttccaattacggcaaccctgatctggccacaggattggggctaggagccaggcctcacgcacaggtgccccctttgcagcctttcccattatcagggtgagcctgtcaaccaagcctgctcaccgaaatattaaaaagacaataacaggccaagctcagtggctcacacctgtaacctcagcactttgagaggatgaggtggcggatcacttgaggtcaggagttcgagaccagcctggccaacatggggaaaccctgtctctactgaaaatacaagaactagctagtgtggtgggcgcctgtaatcccagctaattgggaggctgaggcgggagaatcgcttgaacccaggaggcagaggttgccgtgagccaagattgcaccactgtactccggcctgggagacatggtgagactccatctcaaaaaaataaaaataaaaaagacaataacaaactaattaaaacagaaatttctgtgagaatgatcacaggagaaaaaaaaccaaagacacaaataataatattaggaataagaaaacctgatttcattacaggtactaagactgtaaaagggtaaaagaaaattatgaataattttttgccaataaactttaaaaccttagatataataaaattgagaaataattctcaaggagaaaacatgtaactcaccaaagctgactaaagaaaaaacagaaaacattaaacgtggcgttaccgtatgacccaacaatttcatttctaggagacatccgtgggcaatgagaacatttccatataaaaacgcacacaagagcacacacagtagcgtcattcgtgacagacaaaaggggcagcaacgtaagggtccatcaatcgataaaccactaaataaaatgtgcaatatccatgtgatggaatatcatttagcagtaaaaaggaaggaagtattgatacatacttcaacatgaatagaccctgattacattacatgctgagtaaagcagccagtcacaacagaacacacacagaattccacttatatgaaatgtccagaataggtaaatccatagaaaccaaaagtagatcaatggttgcctagggctgggggtgggggaagtggaaagggggagtggtggccaatgggtaggagtttttgtagcatggtaggtgatagtgttctaaaatcaatcatggtaacggctgcacaactctgtgagtatcctcaataccaatgagttaacgagctgtaaataggtgcatcaaaggatatgttaattacatctcaataaaactgtcatttaaaaagaaaagaaactgttattgattatacatgtctgatataaataactctgccccaccttcaacacagacatctcagcttatacaccacatcctgcagaacaaaggtctataaaatcattcaaggtagcacggcaccccctagaaagtttttgtcccatgatggcgaggcgagtggtaagtccagcttcaggtgaccgtgggggaagcggggcgtgtggccacaggagcccaggatagattgctggtccacagtccaggttctgcttagtcctcgtctatggaatgaaggcaactttcatcctcaatgagttctcatgaggattcaaagtaacaatatgcacaaatactttttacttggcaaaccgcggagctcaggctttttatcgcttgcctacgaaatggaaggtgaacctgtcagcagatgatgcctgtcaattaacaatggttctcgcgaattcaaggctgagggaattgaagttcagggtggttggggaacttgtccagagtggtattgctgatttcacaatgagtaaaccagggctcaagtcaaatctgctgttgaacagacagcattaagcaagataaccagttggccgagttgtgactttcaacaggatgaatgcttaagttgccgctgtgaggcataacagacatcatgttgacaaggctgcaccagccaagggccttccaagaactggtgataaaagcaacaaaccaacccccaaaccttagaatgctacaggtatgaatcagacctttcccaaatcaccatgggtttcttgatatagtcccagaaatcaacaacttaaacactggtgaaaacattcagcaactgacaattcaattaggctacaagagcagaaaaaacggactgatgtagtggttgcacaccaaccagtaagtgaacaccggctccgaaggcctctttggtatgcaccaaaacacatggcatgcggcaagaggaggcgcggcagggagggagccgcacccgccttacagccaaacaaatgaactataaaagggtgaggtgagtcaaccgaggacaatgccctgccaaacagagtgcctcacctgctcacggcttggagtcagccagacccaggcgcgcacatccccaccgccacctccccacctgtgacacaggcctggttacgccacctctctgagctccatttcttcctcctaagaagttggagaatcaccctgacacctcacagaattggtatgggaaggaacaaagcctctgccaacgctcctcacacaaagccctactcctataggggcttgatgcctgcaggccccaccgttctcttcgaagtggtcacagctgggtgtcccagtggttagcacacgagtcaggccagttggagctactcatttttttctgtcgccttcctattcaaaccactgaacaaaaactgtgccatgagggttcaagatgagaagaaatgtgacagtcacgttctgctgcctgggggcaggtgtcctcactgccaccatcccggcctttgccactttccccagcagactgctcttgcttgcagacaaagtccttggatctccagcacctcctcttctgttcgtaccattagaatgtcaagtccagagggccagaggcactacatgtctgttgctcatgtaaggaataaatgcccattttctgcacagggcactgaaacttaggagaagctgtacctcaagctgcagagttagaggctgggaggcagaggtaggcctctgttcttctcactatgtgattacagatgccgagctcactccacgcacctctgagtctgcaccaaagggcactgacaggacagaaaaggggctcacagagatcttctaaaggccagagattgaatagtgattacttagttgtttcaaatcgaatgcaagtgaagaaaaacatgctcttgaaacgcttaaggccaagcagcaggtgaatataccttctcatcactgtggcaattaagcattatctgggaggaaggtgttctggccacctaaattgccacattccaatcatttgcgcatcaggatcacacaaacatgtattttcatcaaggataaattttctcttctaatttccttctttctaaggagtaaggtgaaggaaataatcatctcctcaagcttaaaagctgaagaaatactttaccttcttacccacaacttaagctgttactaacttcagtctcaaaatggctctttttcttccttttgcatttttgtggctaaagccctgatccacattactttcagaattagattaatagcaaattgcatgccagacactgcgtaaggggcttttgtatccagaatcccatttaatcttcacaataatcacaataacaaaagaggaaatcattttattattattattgtcacagaagaagggtcaggctgagttcaggtgacttgcctaaatcaaatggttaaacaagtgaggaaagcatggtgtgaacctaggtctgtgtgactccaggcgtggtgctttctatttcacggaacttttaaggaagactaaagtagaatgcaccaaacaggacctgaaacagcaagactgcacaggagcccggcagctcgggtcaccagagggctctccccgggagcagtgaacaaaggcctgggcaaagagtgtgccaagaaaagggaacaagaggatagaaaaaagactcagaggtgaagatcctaggatgcctatgtttgagaacaagatactgcaagacaaggcaggtcgccagaggatggggccgaggggtgctggtggggcacctggaaagcagctgtggcagtcgactcacactgccagggtggtggcagcagtgacagtgtcgatgctgttctctactgagcacttcctctgcaccaggcactgtgctaagcacatcacatccattctctaatcggattctataacaacccaaaccagcacattctattattaacacactttacagatgtggaaactgaaggtaaagaggtcagctaactttccaagaccccatggcttgtcagaagcagagctggacttgaatccaagtagtctgactctagacaccaagcctgagacacaggccaaactgcctgccacaggaagtaagaggatggctgtttccagtgccctggattcagaggcagaggacacgatggaataatcaattatctacatgcaaaaacacccacttcgatccaccttgcactatctacaacaactaacaaaatggatcattttaagatacgtaaaacctacaactataaaacttgtaaaagtaggccaggagttgcggctcacgcctgtaatcccagcactttgggaggccgaggcaggtggatcacttgaggtcaaggagttgaagaccagcctggtcaacatgctgacacactgtctctactaaaaatgcaaaaatcagccaggcatgggggcgcacacctataatctcagctactcaggaggctgaggcaagagaatcgcttgaacccaggaggcagagttgcagtgagccgagatcgtgccactgcactccagcctgggtgacagagcaagactctgtctcaaaaaaaatgtgtagaagtaaacattaaaggaaaaaattttctagaaaagacatagaagacatgactccaaactgataattggacttcatcaaaattaaaaacttcttctctgagtgacgcttgaaaagataaactagattgaaagtaaatacttgcaaatcataaatctgattaacagcctgtatctagagtatgtgacgatctcaaaatgcaagagtgacaaaacaaacagcccaactttatttaaataaagggcctgaacacatacttcaccaacaaaatctacagacggcaagcagacatataaaaatgcttcatatgataaaaatatatcactatatacaatgatatctactcatgatcagggaaattcaaattaaaaccataatgatatgccactacacatctgttagaatggctaaaatgaaaaagactgaccacatccaatgctgcagacgatgtagagaaccactgatacactgaacagtgtggacagacctcaaaataattatcctgagtgaaagaagccagatcaaagaggaatagtactgtatgatccatccccatattaatagaactctagaaagtgcaaagttatctgcagcgacagggagtagattggattggtggttacctggggactgcgccaggggtagggagcgatgatgagggcacagggaagcttttgggggtgatgaatatgctcactgtccagattgtagcaatggtttcttgggtgtaaacagatgccccaaatgatcacagtgtacacttccgtatgtgtagtttttagtatgtcaattttacctcaaaaaagcagttgtgatggactgagtgactgcgtcccccagtaattcatatgttgtacgcttcccctcaaagtgacggtattaggaggtaaagcctttaggaggtaactatggttacgtgtgatcataagggtgggccctcaggattggattagtgtccttataagaagagatgccagacagcttgcctctagacctgtgagaaataactgtatgcagtttaagccacccacccagtctgtggtactttgttacggcagccccagcagaccaagcttttaaaaatcaatataagcatattctaaatcatctaaatggccatttgtaagaagaagctgcgaggtaatctcaggacctgtgtttgcgtttgtgtctttggctgcttgtgcaagtgttattaccttcactgccaccagctaacaataaggaacaaaggtagaggtgctcacgccacttgacactcaagtgacatcacagcgtgtcagtgaagatttgccctggtttgaataaaggccaatgttgagaatacagatccactccattgtatacacaggcgtgttaaaataaaaggagccagctctgcagctgtccatatacgttcacaattctactggcaatttagttgtaccaaaacatctcatcaagttaatctggtaattttatttgtattggtcttacaatttggcatgtatataatttggaaaagcggtttcacagatttaagtattataagcataaggattctgtatttaattttatgttgatgcatatttaatgtttttattatagtactggttacataaatggtagggatcaagcacattttttcttgtgaaaggggtcggatttcaaagcctctgccaccagctgcaccagccatcggcaccatctgaccacctcctaccctcacctccccgtttctggtaacagtgatgaaggaatgatcagggccagaagggatcctgtaggagcctcatgtaggtcttgttcactgggttcttgaggttcagttcaggagcctgatcatctccgtgtgggttcttcgcatgctgtgacacacagcaccagccgcacacgctgcaaaaaaaccctggacggacccaggggctcctccgagatggatccaagagcaaacttggtttcaagcgcccacgttcagcatcaacacgtgaagcaaatacaacattaaacagctcctacttatcaaaactgagaaaggctccaaccccactgctgcaaatgctctaagacaggaagggatttaggctccctcccaggcagccagtccagaaacaggcaatgcaggattcctcgagaactgcacaattggaaggagatgaaaagtatctaactggaaaacaacaacaacagcaaaagtgggaatgtgggtcaggactactggaaataggaaatccacctttttcagccagctaccgaccagactcacccccagtctgagtttcctgttcgtgagggctgcgctaacattctgtgtccactaacgtcgaggaatcctcaaataggtcccaggggcttctttccaagagaaactgaaagctctgcagcgcttctgtgatgcctggtgtggtctgccttgctgccatccagcatgactgccccagtgccccgccctccctcatgctcaactatggatgcatcttggccctcaagactgtgtctgggtcctcgtttctcccgccgtgtggctggaagggaggcagctggttagcacgcggagacctgacgagagtgtggctgtgcctagaaccagctccgatgctcctcgttcgaaacacccacccctgtgtgcacagcaccttgttctttcgtgcattttaccctacatgggatgttgtttcgtttttttttttcttttattttgagatggagtctcacactgtcgcctgggctggagtgcagtggtgtgatctcagctcactgcaacctctgccccccggattcaagcaattctcctgactcagcctcctgagtagctgggattacaggcacccaccaccacgcccagataattttttgtatttttagtagagacggggtttcactatgtttgccacactggtctcaaactcttgaccttgtgatccgcccacctcaacctcccaaagtgctgggattacaggcgtgagccaccgcgcccggcccatgggatgttgtttctgaggcatgtgtctccatcagctgccagcatagcgtctccttgatgttgggcctacgcctgacctatttctccaccctccaccacggtgtctcgtacatggcaaatgcctcctaggaattgtttccaatcaggacaggcccttctgattgacaagaaacaaagacctgtgtgcctggaacagcactgctcagctcagcagagcctggcgcctgtggatgcagaggggaagcactggccagactgcttccatcctggctccgcgtagactcgttgtgccaccccgggcaggtcctatgcctcctactcccctatccctacagagtggcctcccacaccctggaggacaagcacctccttcaggccgtgctgaggggtgaattctgtggtaaaaacacccagccactctctctcagttaacccacaaatctgatgggatttcaggagctgaagaggggatgggatgtcagtgaggacaccggataaggccctgaggtgcttgctgccttcgagcgggagggacacggcttcaaaggccacttcctcagagacagcaaaatcgcattccacacagagcgggccccatgctctgaaaacatatttgatcctgtgacatttataagccacaagattttcctcacaggagctaaaaatagctaacacagttccaatgagtccaacagccacagccaccctagtccggaagcttgggccagcccaggccaagagggttgccatggaaacagcagacctgggagggtgccatgagcagggagggccgcctacctgccctgcagccttgggggactcgggcgactgaggtggctgtcctggacggggcacgctagggtgggcggcacctatcggaggggaacagcaggcaacctgtatcgctctacatgtagccttttctttttaaaataaatgaagggatgtttggcagacagcaaggactctggagtcagagagaggcagggacagcaggagacctgtcacaagttgactctggggacctaggtagggcacgctgtgtctgggtgtcctcgggaataaaagggggatggcaacaccgcaccatgccttctggcgcctggcacgtgtgctcagtacacagggctgtgctctctccacctccagctgtccaagcttggagaggcagagggagaaagaagcaagtgtcacattccctggcccagaaggcccggcaccaggtgcatgccatgcaggaaaccctcagccacagccgcaggggtggctcactcgcttgctcaggggacacaggacccccctgtgccatgcaggtcacactgcccccctcgggccgagccatcagcagcataaggggagcccatcacaaagggcttgccaaccatcccagcctcctcttcgtcctctccaaaggccccgtgttctaatcaaactgacgtcgtttctgttcccaaatgtatcagaggtttctgccaaccttccagctccacccacagcccctgaggagaggctccctgaacaaaaagaccctgagtgtgacatggtggctgactggcccacaaacagactcttgatgcaaaccagccagaccccttgtgggtcagatgccaatcatgcgcgagtcagttggtgatggggacttgggctgaaaggactcactgccactgcaggcatgaggacagcagctgagataggcgtcccagaaggagggaaggaaagtggccgccttggcccctgagcttccaggtcccaaggccagtccccacggctcccttcccctgacaacacactcacacctcttgagctggcaggtgtgtgtctttgttcctgccactaaatgctctggttttttaaacctcaatgccttttctttcctttccccattatctcagcatgctggaaccacaccgttcccacagctctgagctcagatgtctccatgagactcacagtctttgccgaccccagtttccaggtggctgcccccacccccggctctgcatgatggcatttgcgtctgtgcctgctctgcaggcttacaggaaggctgacttctcaacagtttctgttatcccgactgcactcagcacagagccatcactcagtaaaatgtgtctaattggataaaagagacccacgctcttctgcaaaagggctgcttccaccaagaaagggactccaggttcctgaagggaggccgaccactctgtagccccaggaacacggtgtctgggatggcggaggcaccacacttatttacagacacgccccgaggcaggacagggtgtgcagtcagcttccttagacatgtaaggagtgccttttcctttccacaaggaaaaggggagttgtgtagacaccatgagatgtgaccactgccctcgggaacacatgccagagatgacagcctgacacagagcactgcattccgagtcacacagaggagcactgcattccgagtcacacaggggagccctgcattccgagtcacacaggggagcactgcattccgagtcacacgggggagcactgcattccgagtcacacgggggagcactgcattccgagtcacacgggggaggcctgcattccgagtcacacgggggagccctgcattccgagtcacacgggggagccctgcattccgagtcacacgggggagccctgcattccgagtcacacgggggagccctgcattccgagtcacacgggggagccctgcattccgagtcacacgggggagccctgcattccgagtcacacgggggagccctgcattccgagtcacacaggggactggctcccagcttggccactttctgactgggagcagatcatttaaccacagttacccgtgtgtaaaataaggttatagacagttgtcaagccccaaaagctgtcaggagagtttgatgaagtatttaggtgaagttcctggcctaagatgccaacaccaacggagggcttgaaacgccaacttcaccgagcacttgctgagggcttcctctgtgccaggtactcttttgggagccacaacatccataaatcaatggcctccaaggaaagcttgtaaaataggtcattatccccattttatggccaataaaatggaggctcagagagggaatgagttgcttctcgccccacagctggtgagaggtgaagctgagccgtggaccttgagctgttgggcaccaacgctggcaagccctcttaaggaagagcactgccagggtccaccttcccaccaccagcacccctccccagtggctccctgggcactaagagctttgttatagggaacaaatggaagcagaacaaaagacagagaacccagcgaccaggaccatgtctcaagctacaattacaggcactgcttaagccaggacagccactaggccaacaagccagaagagaagggcgaagggagccacccagtacctggccctgtgatatcatcctagcagggacacagtaaagaggctaactcaagaccccaggcaggtggagaacttcaaagggccaatgaggccaccctggccactggctcagaccacacaagacccaggagtctcagcaaagccttaagttaggtcacaacccaagacacagagagcaagggctgtgggcgatggaggaaggaggcggcggcgagaggctctcacagactgagcacctgtgtcagatgcttgagcagacactttatagagaacagctcatgtattagtcacgaggaatcatttttcagatgtggaaatcaaggtgtcaggggttaagtatcttgcccaagatggatggcaaataaatgccaggttggaatttaaatataaccccgtctggcctcatcacctgtggtcggcatactttggaccctgcagtgcatgcagctgctgtccacagacaatggcctgagccccatcccttgatgagactcctctgaccaccactgaacctcccacagcttggacacccaagtggcaaaagcctttacaaaagaacaaaggcccagtgagactcctgttggggtgagtctgcccagcatcgccctccggaagattcagcctggccctgagccccgacaccctgtgttccagagccctctccctctgtacctggtctgaactggccacccctccttgggttctcccgcctctcaatgtcattcatcctttttgtcagcctgaccctttgtcaggccagctccactactacccgtatctgtgccttccacaggccacaccgccccacggctaccaaccactgtgacaggtgacccagcagtagccggaggagcaagggaacagattccccccaggcctccagcaggcatacagcttactcctccatgttcagacctctgacccccaggagtggaaaataataaatgtgtgttgttttaagccaataagcttgtgataatttgttatagcagcaatagagaactaataccactaacgagagacggaggtgtctctcattaaagactacatgatatttaatgtggcctgcatattaagtatcatgtagcaaggtttaatttttcatagacctttggatacaatacatagaaatcggtgataatactggtattttttcccaccccagtggctctcatgctctcccttggagccttgcactaaatcatggctaacaggctaacaatgctgcgtctgcctccttctaagcccgggctacggaaacagcacagcagatccttctaggaaggtgagatttaaccctaggcttcccaaggatggctgaagtgtagagcagttaaggaatttgcccattttcacttatttactgttttgctcactcatttcatttcatccttattccctgggtgagcatggcttcctgtggccatgtaggagcttttggagggatgggagactcgtcctttcagttgaaggcaacacaactcattctcctttcatggcctcaggtcacgtgggcccctttccctttcacttttagatgatctaccaggaaatgttcaggttttcatgaaaattaagcacaccttcatgctacagcatacctgcaaagccatttgatagatgtaacacaggacctaaagggcgtcggaaccagtgagggattccctccgagaaccagttctaccaaaaaaaaaaaaaaacaactacagaccaagtctcaaacacaaggatgcttatttctatgttatttaaaatacagaaacaatggaatcaattaaaatgactgatgatagggcatgattagtaaattatggtatatatgtagaattgacttatgcaactataaaaaaattatgtttgtttttagccaggcacggtggctcacgcctgtaatcccagcactttgggaggccgaggcgggtggatcacgaggtcaggagatcaagaccagcctggctaacatggtgaaaccttgtctgtactaaaaatacaaaaaattagccgggcgtggtggcgggcacctgtagtcccagctacttgggaggctgaggcaggagaatggcatgaacctggcaggtggagcttgcagtgagcagagatcgcgccacctgtactccagcctgggcgacagagcaagactctgtctcaaaaaaaaaaaaaaaaaaaaatagcgggggagcacctcaggaggccagggaaggcctcagggcagagatgatgtctgggagaatgaggcgggattctccagactgacagatggatggtggtctctccacagggtgtgtggagaatcagttcatagccaactctggaatgcactctctcacagagcactaactcaacactctctaagaatcctccgccttggagaagattcagtggctatgatctaagaagccgaaagccaagttctactcgaggctcttctaccaggcactgagaaggccactctgagcctcaggatcctcatctgtgaggcagggcatcagggctttcggtatctcaaagatcccttccaacttaaccattccaaagcttaagggacttcggaggtatttctatacagaaaaatcattacaaatatgcagaacagcatctccaagatgataaagcctagttatttaagaaaacataaagagatgaaatggtaggaagcatggcaacactgtatacctttgagtcctcaacaaatttgaggaaaaacaatatttgctggaggccagatttttaatttccctaaagtactattcccaccaaggaccttagaccccagtactgctcatacgtgcacttgagaagcttacgtgaaagcaggagaggaatgctgtccataacattgcccaaatgcagctgatctatcctatcgtaccgagcctaactggggctgttgctctcctactgatccactggactcggggccaggtgaaggtgctgaactgtcctcagctctaggactgagtctattccaagtcagcccaggctggctgtaactctctgtggactggcctgtcttcgtccctcagcagggggtctctggggggacacagggcccagctgccttccacaggcttctaaccacaaggcaaggatgacggcccattcatctgcaggccctcagcccctagcacagtgctttgcacgttcaggaattgagaaatgattgtgcagtggaaaatgaccatttaggatagtcctgtgttttctgaaatgtgccctctataacttgcaatgttgggagattctccccgcatgacaatccttgaaaagccaccttttccccaggatgacaccctggggtgctgcagcagctcccgaggctcccagccacctcattagcttcctttgaacagactgaagtctgcacacgtcctcctcaggggagtccatcagagctgcagaactggggctgacaagataggtcctaggatctcattgagccgaaaatgatgcattcatgaatttttaatagtagaaaatttatcaagaacaaagaacaaaggtttccaaggcaaagaagctttgcttgctggtctccaggagcccccagctgacactggctgagattttccatcccgtatccattcacattcaccaaccaaacctctgcttccctgttccagagacataccctagtgcaaggggaaatacaaacaatgcaattacttttaaaaagcagagacgcatcacacgggggagagaaggctccatgttgtgcaaggggaaatacaaacaatgcaattacttttaaaaagcagagacgcatcacacgggggagagaaggctccatgttgagcagagttggctacgtgctgaatgtggaacaggttcactggggaggactaattggaaataaaagaatttcctttaacctaatcaccaataaacagcagtgagggaagcacagcagactgacatctcgggctgacatctcgcacagcctgcgccacaaggccttccggcacagcaccaggcctgtctgcgggaggctttgcaaggggaaaatgtccttggtacctatccattttgaaaaacagtaactacgactactactttcacataggacgtttctatgaagttgtgaagagttctgctcagccagtgcctctgggcccctccaagcgagtcacagtatgagaggtgggggcagaacagacaaggccactggcttgaccatctctcatcctcgaagggaggtggacatggggcacagtcatcccattccaccccagagaaggagaccagatgccagataacctgcatccaagccccactttgctgggttcccggcacacggagtggtgggaaacgcaggatcaccctgggcccacaagctcctctctctgccagggcagggtgctctcacccagggctgagacttctcacccatcagaccctgctctctgctcccacaggatgcatgctgcacccttcctcagccctagctcctgcagcggtggggctcctgcagggaggcacacaggcccaagcttggtccttcttccagaatagcctactgtgcacgcattgcttctgtttttgtctcagtctgtttcttgtgttaaatgggtataaatttgcctgttccttagggctgcaggtggcacgatgcttggcacactctgcgtctcaataaatgccagctcctttctaatcccactgtaacaaaaccttctcaagagcagggagagagctgtttttctgtaccggccatagggggttgagtctaataagtgctcaataaaccccaatgaaaagaacaacagcctcatttacatgctgagtacacacgtgcatcaatacatatcatggcaggtttcagatggtcatttcggtgcaacctcagcaccattcccgacatacggtttagcacaaactgggtgctccatgaaagtctttggaatgaaaatagaaaagaataagagaatacagagtcaactgtaacatgacatattaacatagggtaagaaaaaagcatgcaccttttaaagagagcaaaaagtcaacataaagacgaagttttaataagcatggtagtttgtctttaaatgcagtggaagtgcggtagattgcgttactgtccgaaacactcagggccccttcctacaggatcatccagcctcaccttgttgggttctggctgcctcatgacttgtttgactgagagcataatggaagtcacacaggccacctgcaagcagaatgctcatgagcaattcttgggtccttccccttcacttttccctctgccatactccccagtatgtctcagagaggacttgggtcactgaatgaaagcagaccgcagcagagccaaaaccaggctgcaatagacacagaacttaaatgagaaacaagtatttgtgctgctgcactaagtcactaagattctgggccatttgttactggagaataacttatcctgcacagaatgatacagatcagggttcgaatgactcgatccagttcctactgtattggccactcagctaggtgtcggtacagagagatgatgaagacaggattcctgccaaagggggctcccagtggagagactgatgtctaaacaatgacactaggcatatgctgtgcaggacatgtgcacagagtgctccaggagccctgatcacagtggctggggaagccaaaggcaggtgacatggtgaggaaatgcctgggcccgccaggaagaaagagcacaactggctgttcatggcctcacgcccacagcactgtatgttgtattaccccagcatttttcctttgtcttctccctctgctatggaataataactggaaactgtataataaaacaggttttaaaaagcacgctttgtttttgtttttaaaaaaaacacaatggtggccgggcgcggtggctcacacctataatcccagcactttgggaggccgaggcgggcggactgcctgaggtcaggagttccagaccagtctggcgaacatggtgaaaccctgtctctactaaaaatacaaaaaaattagccaggcatggtggcgtgcacctgtaatcccagctactcaggaggctgaggcaggggaattgcttgaaccagggaggtggaggttgggagactgcagtgagccaagatcgcaccactgtactccagcctgggcgacagagcaagactctgtctcaaaaaaaaaaaccaaaaaacaaaacaaaataaaaaaacaaaaaataaaaaaaagcacaatggtgcttctgtgtgctctttcattacgtaaagctgagaaacccgcacccctggcccacagcctgattatctcccccatgtttagctgcctattatctgtgtgtccccatgtctccagcaagccctggaaaccagccccacttaaaagtcttatgttctttcccaggaggggatgcccagtctgactcctgccttcctgggatctcagagagctccaagacgaccctgaaatatggtggggacaaggccagcaggaacaatgggactcggccggcctttgggccagaccagcctgggctccagaatcacgtcgctagtgggcagggatacgtgcattcacaaagtcacccgctccttaagggagacgttgtctactccggacaaggctcatgtggaggggcctcttcccgttctcctcttcagaatgacaggagcctgccacagaagagtactcataagtggagcgactaccacttacggatgagttgttaaatacaagacaggcactacaccaggtgcacaagagcgagtcacccaacttgtcctcatcccggcctagcaagggaggtactgacatcatccccgtttcacagatgccaacactgaggctcagagaggttaagtcactgacccgagattacaccacatgcaaatgtggtgaaggaaggactctaacccccgtctctgcagcccagaagcttatggcccgtccacaatttgtcacatggagagaccatcagctccagctgcacttcagacaaactccatggctagaacaacaggagtccagagatagcaggaacaggagtcatggttttgtgtgtgtgtgcaagatgtgtgaacacagccacattctctgaacacacgtatgcacactgcacatggatcgtgcatgtctaacgcagccattccaagtggaaagatgagcgaagggaattgagaagatggcccggatgggcaaatgcccgttcttatgttcaagatccagtgtcgctgctttgggcatgagacagagggcatcatgtcacacacctcccaccccagggcagcttctgtgcccctccttggatgcccccgcctcctgtgctcatttgtactgcagcctttccctctcgctagactggggtctcaaagccactgtccttttaatagccgcatctgcagcgcctggtgcgtggcttggctcctggagaaaacgtgattcatatttggaatggccaagcaaggcaggtctgacagaagtcactgcaggagggtctcacggcctaggttcggatcctggctcagacacatcctagcagcgccacctggggcaaggggcttcacctcaccaagcctgggtctcctcaatgggctagcaggaatatgacaaggatcacagaggtgacaaggcacatctgcaaacctgcagctaacactgaagggctggaaaatgtgaacctgtagagcacaaaggtgtcagcaaatgtcagtgggatgccgtggaatgctcctcgccccccagtgccaccaggcacaaaggttcaagcttgggaagccaaaaatgctctcccctgccatggctgctttgattgtgtctatcttggggagtttccagtggctaatagatctggagttaatgtaacttcacaaagactttaggaactaacacaaattaaatgactccattatgtcagcctcatttcactttggttttgccgccaacagttctaacaggcaagcactttgctctatgacactgtcttgttatccaagtttccagccagttttccacattgaagtatttctttcagtacgcaaaaaatgttgtgttagccacagtctaaggaaagacagcaatttttcttggccataaacagcctggtcataaaccacagcctgttttctacgagacctcctcctcctgctctttctgcccttcctaggcagaaaagcatcatgtaaggctgaagggaagcacctcggaaacaggcgccagcgatgcccaaagagaaggagccgggcatcaggagtccaggtcccagctctgccgcctgacgctggcgcccgcagcatctctgggcgtcacagccctctgctgggaactgcagaactcggtccccagtgctgttcacagcctcagtggcatgtcacatgagagaagatgtgaaagtcttagaaattagggagcccaggacatgagaggcatttgaggactcaagaatgggcaggaaggagaggatcaaggggagggagggtacaagggaaggcaggagggcagatctgggctgggagaagcgggagccagtagcctgagatccctctggcaccccagagagaggccccttcatacagcctgtcccagagacctcagacacacggaggggcgcggcttccctccgcctttcccagggtctcactcacaagagggaagaaaaagggtcaccttttccaggtgccttacagggttataatcagctctacttctacctcctcatgggacccagcagaggcccagcttgctggactggacctaagtgtcaagggccaaattcagggagcagggctgtggcaggggtagagtcacgtgccaggcctgcaatgcgcagcccagtgccctttgtccaggatcacagtacaacctttctggtgtggccagaagccagctgaacctgaaaggatgggggccacgtggctagacaacctctgccccctgtcgaaccccctccaccccagctgtgactcctgccctccccgagtgagtgaacggcaaccccacctgccctgtggcccaaacccttcccctccttctccataccccacacccctaaaccctgccaaattctcctcctacccacacatcccggaatccacctcttttctctgcaccaatggcacccccaggcccagccactgcaacccaccccgagatcagcacctaggctcccgccagtcgtcactcaccccttccaggcacttcccaaaaggccaatctgatggcacactctcctgccttctcatgaccgtcccttccctcacaagagacctgacttcgaccttggctcatgggccctgctgcccctccagcctcaccctggactatcgtctctgccctcactcccaccctgaacagcttcagcctcgggaacccagtgtgctcccctgcccccaacctcctggcctggcacaggcagtcctcactggtaagcaatccccacccagctgccctctgcctgcccagctcctcctggctggtgaatctcccctgaaggcctcttccaccagaaagctgtccccaacacctgcacccaggctggctggaggatgagcccctcctcagcagtctctgggcctgcccctgccttcataccttgcagaggtgggtgctctatcccctcgagcccagtgctctctgcacaaagaaccatgccttgttctcagctgtttcaccagcaccaggcgtgcctggcaagatgacatgcacttaacatgaggaatcaatggcaagaatgaatgctaaagttcatatatatatatatacacacacacacacatatatatacacacacacacacacatacacacacacacatatatatatacacacacatatatacacatatatatatatatatatatacacacacacacacaatttttttttttgagacagagtctcgctcgctctgtcacccaggctggagtgcagtgatggctcactgcgacgtccacctcctgggttcaagcgattctcctgcttcagcctctcaagttgctgggactacaggcaagcgccaccatgcccgcctaaatttttttgtattcttagtagagatgggggtttcaccatgttggccaggctgatctcgaactcctgacctcaagtcatccacctgccttggcttcctaaagtgctgggattacaggcgtgagccaccatgcccggccctagttacatatttttaattttcagtataaagaacacaccctgataccaccccacacccatgccctcatgccaccaccaaagcttcagggagaattgagcaaaacgcatttaaggaaacaaatacctttgactctctcagcttataaaatgcccatggcccaactctgaggaggggtgagtcccaaacttacctgggaggtgcttctgtacagaacaacaacatttgatacttgtttttaccaaagttttctcacagtaatagattaaaattaagatgatgaaaagaaccgtattttaggaggctctacccaggagtacaggaaaacacagaattcctctgcatccttgcaaatgtgcctctccggggaggctacgccacagaaccccattccatctgacaggctacttggaaaaagggcacagggcctcagaagctcaaggttcagactccccagaccacgtacaactcacacaagacacgacctgggccccagacaccacagccctggccacgacttggcccagagcaacacaaatcacaggtgctgtggccaaagtatgttttatctgtacctcaactaagcctcagcatctgaggctggatccctggggtcacagagagaatgaaaacttagaccccaaagaacttccctaaaacatggaggatgcaaaataaacaaaaatttcttttcccattaccaaaatgcttatagatgaggcagacggggaagaaggtcggagttccagttcgccacagctgatactccgtcccagacccggcctcaggctccccttgtccaggggctcggctgaagcccagcagctcctctcctcccaccactgactcagaagggacgaccacattctcattcctgcccccagctaccccatggactagggggaggaggaagaaatggcttcaacaactagagcgcaggtggaatttaaaagccaccctttttctatggcaaatgtttctaccataagaaaaagtacgtcccagttattgtggccctgcatagacaaacgtttagcaagtccttgtcatgtgaacagagagggacccagcacagactggcctctgaggcatccgtccaagaggaaaggtctaggataggggaggccttggaggggtcaggccccgcaccgtatcaccccagcagcagggtggccacgggccagcgcccctggacagtccaggtttaggcctgccgtccctgcaagatctgtgatcaccgtctgcccttcattctcaaaaatctccagtcctggatgaaaaccacagggccgtggcacccaccctgcctcagcctgctctcacactgaccgtgagggtcacacaaggcagggcttaccaagtccaccttcctaccaagacctgacctggacagggggcaaactgaaaaagttgaaatgttccactgctaagagaagagggaatagtaacggaaataaaaatcactgagaaatttctatgaaattggaaaacgacgaatgaacaaaagtagtttccggcctctggagtcactggcgctgaccccggaaggcacgggtgaaaccacactgagcagcaccagggcaaagtcgaaggcggtactgagaaaggttttccttccccacatgcaggaccctctgggaggctgggggaggaggccgaggtgagtgccaggcccccaaaccaccccagggaccttctccacagacccactcctggatgttgagacacgcaccaggcccgtcaagctactgccatccctctcgagtccctgcgaacctccccacacaccctgtgggccacctgggagggagaaatgatctataaggacgaatggcaggtgagcaagggcagagtaccaaagaaagcagcaggagcttcgagagcggcctgacggctccatggtccccccatccctgccgcccaagcctccaggccacactgggtactcgtcagggagaggcggtgaggaaaggagtttgagattactcaggctcaggtttctctcctgtgcctgccacggttgaaagatggatggggaatctgagataataagaggctgaattcacagctcgcccagcaggctcatgtatcggtacgcaagagaaaactgtgcgcttctaggagaacaagttacagacaacacaacagaaaatggaaagctagtagaatctcagagcgtggatgtacagtctcccaggaagggcaggaattcctggatgagcctccgccatgtgacgggttcttcctgagctaacccaacatctccccgttccagcagctgcagcatcagcagacaagaccccaccactgattacattaagtgcccaccacagaaacacccacatgacctcactacaacctcttggcaacccagaggggtagttatgatagtcctgattgtgcagcccttgtggaaactaaagctcacagaggttaagaaaatgaagttattcaactcaggatggcttgaggtcaatgttttctccatgacattcagccagctggggcccagggccctgggcccactaaagcatccctgtagacaagggaggtgaggcacaccccaggctgcccaccgtgccggctcctgctgtgtgtgctgttcatgctccttctcagctcctaaagggctccattttacagacgtggacgcgaggctcacagaagaccagctcatgtggaggctgggcccaggtttccgtggtcttccactccgcccggcagcctccggctgcctctccctctccgccctgttccccaggggctgtagctctgccgagggcacctccacaggccatccctggggctgcctgctctgcctcccatcagcagacctagatcagccgcacccgattcaaagggctcccccagcactgcaccccatcagagtcaaagcccatccttgtctccagactgcctctccagctcactctccaggctggaaagcaccaccaagaagggacagcggtgattatgagtgaacctaggaccaaggtctggcaactttcactagaggccaatgaaaacaaggactgccctagacgagactttccaccaaactgcatgtgaatgaggctccatacacaggtgtggcttctgggcagcactagagacagtggcgactgctggtcagcctggatcactggcctccgcatttcgctagcacacaggttctgtgacttccctgaacgtcagagcacctggagggcctcttaaactacagatcgctgggccctgccccacagtaagcctggcgtgggtctaagaatttgcatttctagcaagttcccaggtgatggtgctgctgctggcctgggtccgcactttgagaaccacgactcccacaggaggctttcaagccagctgtgaagtggtcatttatgctacaggtgaaaacagagaaaccccaaaagacaaagatcaaggcaaaggcatcctcttcaaaaacctacaaattcctcattaaaaaatataaagatcaatttccctcaacctgccagccaaggtcctctaggatttggcccagccaagttgacccctcaccacccccacactcctacattagcaccgagcatcagcatccaggccatgggacgccatttccctcccaacttcaccccactcaagctgccctggctgtgccaacgcccctcctctcttcatgtcacctgtcagcccatccactgacatccccatcagctgctctctcttctaataagtgtcttcagaaaataaccctcatgtttatggtcaactgattttagacaaaggcactaaagccatccaatggagaaaggacagtctttttttttttttttttttttttgagatggagtctcactgcaggcttcacccccccggggttcacgccattctcctgcctcagcctccccagtagctgggactacaggcgcccgccacctcgcccggctaattttttgtacttttagtacagacggggttccactgtgttagccaggatggtctcgatctcctgacctcgtgatccgctcgcctcagcctcccaaagtgctgggattacaggtgtgagccaccgcgcctggccagggttttttttaacaccccatgctggaataactggatatccatatgcaacataagaaaagcattcacctcacacccgacacaaaaaattagctcaaaaggattatggacataaatgtaagatttaaaactataaaacttctaaaaacaacataggagaacatatttgtgaccatggattatgcagaggcttatgacaccaaaggtacagcctatgtttaaaaattgataaactgtacttcatcagcacctacaatttctctcaccgctaagaaaaagacaaatcgcagactgggagaagtatctctaaaccaggcatttgacaaagggcttacgaccacaatgcacaaggaactctctgactcaataataaggcggctacgaacctggttttaaaaagggtgccaaaggctcaggtgcctcaccacaagggatctgcgcacggctcgtgaggagctgagaaaacgctcccatcagcccttggagaggtaaatgaaaaccacagggagaagccacaggccaagacgtacatgaagcagccttgcagagtctggcagggaggactcagctgccatcccggtgcccttcgccttctgcggggatactggcaccagagtcacttactcacaggcacctggaaggcaggatgctgcctgttcacctctgctcctctgagaggagcagtgtgggggagctgtagggggagacacagggtccccgagacaaactggtgagctgccagaagtgtctggaagtttccaatcctgcagggccgcggaatcagggtcaatgctgccccaatttctctccctgggcagctactgggtctggattatctgatgagtaagacgattctggcctgaaaacatacagcaaatgtcttcgcatcttcacctgatcacttccaaacctcaagcagtaaagcactttcatattttgtttcgagccatgcaggagaagagtaagggtttttctggggacgagagggcttgaatgtgccagaacaggtgtaacggcccgtgcgggacagggctgggtaagagaacaccatcaaatgaaacggccccatcacagaaccgataaacactcagtatctgccgatggagattcacaacagtatccatgaagtagcttcgaaaaaaaatgctgaggccaggcgtggtggctcacacctgtaatcccagcactttgggaggccgaggcgggtggatcacgaggtcagatcgagaccaccctggctaacatggtgaaaccccgtctctagtaaaaatacaaaaaattagccgggcgtggtggcgggcgcctgtagtcccagctactctggaggctgaggcaggagaatggcgtgaacctgggaggcagagcttgcagagagcggagatcgcgccactgcactccagcctgggcgacagagtgagactctgtctcaaaaaaaaaaaaaaaatgctgaatacgatcaagcctccctcctcctcattcattcattcattcattcattcatttttgagatggagtctcactctgttgcccaggctggagtgcagtggggcgatctcagctcactgtagcctccgtctcctgggttcaagcaattcccctgccttagcctcccgaatagctgagattacaggtgtgtgccaccacgcccggctaatttttgtatctttagtagaaacggggtttcaccatgttgggcaggctggtctcaaactcctgaccttaggtgatccacccaccgcggcctcctaaagtgctgggattatgggtgtgagccaccgcacccagcctcctactcctaatttaatgaggactaaaaaaagagaaagaagaccgaaaaacaagttttgttttgttttgtatttttagtagagctggggtttcaccttgttggccaggctggtctcgaactcctggcttcaagggatcctcccaccttggcctcccaaagtgctgggatgacaggtgtgagccacggcgcccggctgaggaacaagtttaagaggaccacaggcacacaaccggcagaaccccaccctgggatctttttaatgaaatgcaaaatgtccaagaggaaaagaggtgaacagtcaacctgcacattaaacatggattgagacatagccatttcttgaattctgatgcaaaccaatgttaggaaataggtcactgagacaaccggaaatttaaacaccggctgggtacttgttgataatgaggaactgttcattgttaattttaaagcataatgaagtattgtgacatttaaaaagagttacagcattaaatatgaaaatgtttacagatgaaataatatgattgattggatctgcttcaaaattagaggaaatggggaaataggtagggataacagatgagaaaaatccaccgagcattgctgcttgttgaaggtgggcgacaagcacgtggggtcattatccgaagatggtgccttctgtgtatgtgtgtgaaatctccataataaagctgtgacgtgaaagaccacacagcgatggctgtgtctgtgccaggctaccctctgcaatgccctttcactcgggcaccttcacggaagttgcccaggcctgaggcgggtgtggctgggattcccactccccgctggacagatgaggggctgaaggcaggccgaggtcccagagaaccagtggagctgggatcgcaacgcgtctctgctccgtccagagcactctggtttttttccacagataacctgagttgctttcttcatagacgggcagagacatctgggtgggcttcacaggagagatgtgtgtgtgggactcggtggccgggctcccatccccaggaggggagtgaagagttcttgcccgcagaccaactggggcgccgtggttgacagcaggccaggtgcggagccgtgagggtcaggtctgacaggaatgcaagcaccacaagagaattaaccactggtgtcaggacttggtgtctcttcctggtgacctgaaggttgaccaccaccctgtccctctgaaaaatctcctgctgggccaggcttggcttaagaaccgtgtaggtggtgagagcctgggagtgaaggctccggtgggaccacctgccccaggaaggaggggtcctgggctctggccagacgctgccacggagcttcccactcacccgcccactcgcaagccaaacgtctctagcccagcacaggccagatggaggaccaaggtggtgggaagggcggacacgaacggacacgggtgctgctcgcagacagctgcagcctggcgtcatggctcctgcactcgggtgcacggtcggcaccagaggagattaaatatgccaatgcccaggctgcgtccagccagtccagtcaggatgctggcgggtgagaggaggggacaggcacccctctttagtaaagacccccgggtgatgacaacacacagcaaagtctacgaacctctagtacagcaagagggagaatctgaggtggaaaacaacaaaccccatccaagagacccacagtgtcgaggaggacaggacagcgcccctcacagcaaggctggggaaccaagagacccacagcgtcgaggacaggacagtgcccctcacagcactgccagggggacccaggacagagctggcctaaagcggggcttgagggaaagaagagccgtggccgatgggcaagtgacgccctgactcctctctgccagctggggtgtggggctgagactccacagaccacattcccgctctgcccatgggtgctggcgggaggccttcggaccacagagggaagaagcgatctgctctccctgggcctccccttgcccctcgagagttttctgtctacgattcctgcaggtaccccccagtgacatcgcacctcacttccaagaccccaggtgtccccttctcaaatggctgtggcagctccatgcccccccagacttctctaacaagatgccaaccccgagggaccacacccctccctgcagccgccccataactggcacacctcagtgttgtcctctgcctaaacgggcccagctaccaatgttacacctcggacacagttctccatagcgaatcttctctgttcactaagcaggtggctcctcactcctgaccaatgccaggagaactttctctgcctccactctcaatgccactgagaatccaggcaaatggggccccaaataacaaccaactacttgagcagaaattgggtccggtcacctccacaagaaggaaacaaaagtcccggaatgcctgccctgcacacgagccatgacgtgctccagccgtgcgatctggagggggacagctttgaaattatcactgtaacaaaggggcaccaggaggtaacagcaccatcaccaacggctggccactggccatgcatcgggcatggcctctaacgctgctctttagatcaacctgccgggcatggattcgattcctactttatgaagagcactcggcgcacggtgaggccctgcccaggcacgcgaagccagctcggggcggagttgaggctgcagagggctccgcgtggctccagcccgtgcgtgttcatctcagcccagcaagtggacagctggggacaggtctgcagacagggtggggcgtgggaggagccacacgccccccaccttccacgcgctaggaaaggctccagacatttccccaccgcagaagccacccacggacaacagaggcaaagacccagaaggaaaacctcctgtcgaaggtttctgaggaacaaagaggcgcgtggtgtgtggaaagccaatcaagtcatcctatttttcttttctcacagaaagagaagaatttctcttgtcacctgagtcagcaaaccactgcatcttccccagcattgaatttctcgaatccaattgcttctccaggctgaacgcaaacgttccttccctctgcctattaatcactgggaggtccctattgatcccagagccatctgggtttgtatcaggaaaactgtaaaaactgctcattagtggggccagtgggggttgcagagacagctctggccagggagtccagagcccaggctctatcaggcctctgccacgggctcactaactgacctcgggtctccatctccccgcatcagctgaagggatgagggcacatcaggatgctttccccttgtttctagaaattatgtttctgagggactctcctcatttcctttcagattgaaaaacgaggtacaaagaaaatccacgcaaaaactcatctgtaactcatactgcagaaggaacacagagggatgagcaatgccaacacagtataaataagcctcaataacaacctgcaagaagactgggcgccacacggttaagcatcactttgatgattcacaaggttctttggaatgtttgaaggaattaaaccagaaacaaaaagagacaggcgagaggagtagccagatagttgagttgggggctgctctgacctgggataaacaggaaagtgcagcacccacataacccccaggagatggggttgcccagaaaccactttctcaaagcatcctcgaggagaagttgtggagcccccaggttggccattgcctgtggggctcttccctgcccctctcgcagcagagccatgccatgatccacgtggatgctctatcaagacacagccagagctggccgctcagatcctgccggcggtccatctccccagcagccgcagcgtttgggtgcttcggtgccaggtccgctgcaccctctaaatgcggtgtccctgcagcaagcgagggggacagagccgggcatcttaaagcatgtaatgagataacatctattatcatacattataaagaggtttatgcatacatgagggttgtcatgaaatttaatttcaatggtttgataattaggcaaaaaaacccacaattgtcgtatcttaattttccagtaaatttgctgctgctgctgccaacactgtattttcctaagaaagttcatgcggtttcactaaggagagacatccactgtttccggttgtgcatggaaaatggacgaggagggaaggccgattctgggaacgcagcctagggaaccatgggcaactcccacagaaaggcgggcggtggagaacaggtggctggtgctcagcagcccagttccacctccaactgactgcatgcccctggtgggtctcgacctcttttactcatagggaaaaatgagtgcaaagcccactccctgtagaactgcctatgaaagtggtgtctttcccaacactgccccggggtagaaatacaagttaatacagatctccagctgctcgactggaaacagggttccgaatgtcatgaccaatggcctggggcccaggaaacagactcaccaggcaccaagcatcacaaatcacatctggcaaaagcaaagttaactaatggtccttaattacagaactgatgtatcacacatgccacagaaactcacaagctgaggaatgagtcactaatttccaaaggaccttttaaaggagagattaggaaggtgaaaaagtactttctacatccaatcgcttcagtattccattgtaaagtatgagactaacaagatctcgctaagaaatatgataagagtggcattgctaatttctaaaaactctaatattcacagtctatgaacacctctttcacacttaccaccccaccacactcccctccaccatgctgctccccctgcctgcacggctctccctggcacactggccctggccacctcctgctcactcgtcacgtcgtgctgtaaatgaatgtttatgccccacaaaatctacatgctgaaatcctaccctccatggtgattatattaaagggcagggcttcagggaggtgatcagctcatgaagatggaatccacatgactaggatcagtgttcttttaaatgaagcttgagaaaaaccctttgcccctcccaccatgtgaggacacagtgagaagcctccaactacgaagcaggaaatgggccctcaccacccacagaatctgcccagcgtcttgatcttgaacctgcagcctccagaatctgcccagcgtcttgatcttgaacctgcagtctccagaaccatgagaaataattttcggttgtttataagccacccagtctatggtattttgttgcagcaactcagcatttccatattctcatcacctctccaggaagccctcctagccaccttccttggccccccagtcctaggcccccctcctatgtgctctgcattctcctcacactgtataacaattgcctgtttgtgtgcttttcttccacacctaaatataagtgtagtgaaaacacaggcaacaccacacgtactcagcagcttcactcccagcagggcctggcacctcggagatacacaggaaatacttggtgaattaacaaatgaacaccctggatatcaaaggcccagtttgcttctccatctcaccctttcttctgctgggtgaagctggactttacgatcttgaacccaacttaccaaaggctgcacagagcagaaagtgggaaataaacagaattttgcccccgccccggcctctctcacaccatcccaagcttggctccagcatcgtctccccttggtgtgtggagcagcagggcagagcctggatgtcagacagacggggttccacaaagtggctttgatcagccactcattttgcttatctataaaatgaggacactgttcccacatgagaatattatgaggactgaatgtgacttcatatgggaagtgctcagtaaatactatttccatcctctcttcccccaggaagcatgttgctcctcctcgtgctgttggggacacatttctatccatagctcttgcactgggtgagatgagatcaccccttcctactaggagggaggagaggcggcaggcaccacaattatctaactggggttggtctctcagattgcaggccacctttgaatgccagttctgcaaacggcagcatccaagccatgttaattccaggaatctggctcttcctttaagagtaggctgtgctatctgcagagaaaagttctgtgcacctgcctccctcccaggtagcagtgagagcaccaccttccgctcctgctggtagcgatgaagctggagtctcagccccactactgcccacacctccaggcagagcccatgccctccccactccagagggcagatcgcaggcaaaagaagcttctttaggtttagcacagcctgggggtggggggccggggggtggtggcaggggtgcctcctcgtaggggaacgggagagccaggagagaggttcggctcaggactctgggaaggaactggatactcaagacacaaagcctggaaggacagggaccaggtctgaggtctgtaaggtgctgtccggcgttgcgaagtaaggtagagccatttccacttcctccacctgcactgctctgcacaacccctccacggaggccgagtgtgcatctgacccacagaaggccggtgaggcactgagagaggtttgggaaagggaggggaagggaatcatgcattctagggctcagggcagagttgcatggattcatgggtatccccagcagtgggcacagcaggggaagcgcctaagatgacttcccagatggacgtaacctcatgacctctagttcacccaacgctcccacccggcccgggacagcaagatgcccttgtcaggcagaaaagggcagccgctctggctgggttagacacttgtcccaatgtgttgccaatccccagcgaggaggggcccttatttattcttctcagcacgcctgaagcctgacacagggcttaccacacagcaaattgctgaagtatcaatatttattgaatgaatattttatgaataaataaaagaatattcgagttagaagcattcagaaatgagaatttaagcaaaaacttaataacaaaaaagcctgaagcacaagactaaattgtgattatttgcagctgggattgttaatgtcatcagcctcacattgccaagaatgagtcaagcttactatacaggacaagcttagcaatttataatttctttaaagtgttttatactagtgtcataagacgaccagatttatgttctctgggatcttggactacatcaagttatttagataagaaagagcagtccgagggctgacagttccctatgcagcagcactggacccagcactgccaaaggcgtagaccccagaggatgcatcgatgctccctgaaggcacctgtcctcatcctgaggaacctgaggtgccgcagcatccagccacagccctcacggctcatacacacagaagcatacaccagccccacgcgcatacccacacccaagtgacaagtcctttccaagggatcttgggaaggaggattttctggcacctctcaaaggcaggccataaatgtcccccaagccattgaatctctagcttccagcagcccaaacaggacctgctacaaggctgcagggcctggcttgacattcatgcgtgtcattaacaataatcacattaaatatgaataccctggaagccacctcacagtgagtgcattagcatggaaatgaataaagtggcatatttacacaatgaaatattaatagcagttcaaatgaaagaaccagatttatatttagctccaaagaataacgctgatttttaaagttttaaaaggacatatatgatatggaaccacttatgccattgaaaaaaagactctcggccaggcctagtggctcttgcctgtaattccagcactttgggaggccgaggcgggcggatcacaaggtcaggagtccaagaccagcctgaccaacatggtgaaatcccatctctactaaaaatacaaaaattagccgggcgtggtggcaggtgtctgtaatcctggctactcaggaggctgaggcaggagaaacgcttgaacccaggaggtggaggttgcagtgagccaggactgtgccactgcactccagcctgggtgacagagcgagattctgtatcaaaaaaacaaaaaaccaaaaaacaaaaaaactgtcaaaataatgtttgggtggggatatatgtctatacaataaagtagtaaaacatggatgtggaatgataccatcacctctaagaaagaaattaccttaaagaggaaggaaagagaaaagaagatgggatgaggtgggcagaaaagaagagcttagctatttttacttttatttttgccaacaatttcttctaaaaaatttcaaatataaggtgaaaaagatttacactgaacaccccccatatgcccattaagagacgctactgttaacattatactatatttgcattaccacctaatgtgttcatctgcccatctattaatctgtcagatattttatagaactcaaagactattgtagctatcatgccccgaccccaaaccctccagtgtgcatatcattaacagagctcaacactggcttagtttttccttctgctataaagctgatacatcatgaaatgtacaaatctcaagtgattagttgccgagttttgatgaatagatacatgtgtgtaacccaaaaccctactgatgtatacaacatgaccatcacctagaaaattaccttatgccctttcctgatcaaaccctgttccaatctctccagaaggaaccaatgttctgagtttttccatcgtaaattggttctgcttgttctataggttggtgtaaaagtaatggcaaaagccgcaattacttttgcagcaacctacagcatttcgtatcaatggaaccacatggcatatgcactttgggtaaggctcctttcacccagcatcctgttcctgagagttgcaagtgctgttctgtgtatgagtaattcattcgtttttgttgcagagtaccacaccattccgtttgtaagaaaacaccgccatttgtttgtccgttctcctgtaatggacacctggcctctattttctggctagaacgttgtataggtcttcttgtgaccatatgtttcatattatccttaaataaataactagggttgaaatagctgggcaaagggtaagtgtatgtttaattttacaggatagccccagacctttttccaaagcagctgcactattttatatccccacccacaaggcatgagagttcctgttgctccacaccctcaccaacatttggtgctgtctttaaccatcctgatgagtgtctcatgctgtctcatcgcggtttggacttacattccaccactgattgataatgttaatgttgctattttaaaaaacattttatttccttaaaacaaatgaaagaggcagagagagagagagagagagaaagatctggggcaaataaaacaaaatctaggatgtgggtatgccagtttctaagtgattttctgtatgtttgaagtcttcagcaattaaaaataaaaatattattccctctagaattccatgtgtaagtgtgtgtccctagaaccgggctgggcttggaagcacagcctcttaatatggagggagggtgagtggagagtgggtcaggggccactgaggggctccgccatggaaggacagcatcaccccggagtcactgagctccacctgcctccgggcaagccctggcctcgctcctgaccagctctcacttccgcatcagctcctcactcacctccgccgggccaggggtctcctgaggctgaccctggccagcaattggtagtgcggcctctctttgccctacagagactgggcttgggtgactgtgctcccctcccgaaggcctgagccttgcctgtctttctgtagcattaattcctcttgatgctgacatgcagttcccagactgatgccaaatatttccagataccacctctttttttttttttttttttttgaggcggagtctcgctctgtcgcccaggctggagtacggtggtacgatcgatctcggctcactgcaccctctgcttcccgggttcaagcgattctcctgcctcagcctcccgagtagctgggataacaggcatgcaccaccatgcccgggtagtttttgtatttttagtagagacggggtttcaccatgttggccaggctggtcttgaactcctgatctcaggtggtctgcctgccttggcctccccaaagtgttaggattacaggcgtgagccaccacacccagcccagataccactttctcaagaatttaacagcaaagatgcccggatgctgctgggtcctcaaatgtgggctctgaaagcacatgttgctacttcctcagacgccatccggctttacctactttgcacttagctctaatttaaaacgactccagattctcccaccaaacttgaatagtcactacggtatctctgaaagggagacaaactgcccatcctctgaggacttggggtggattatctccacaccctcccaagcagcgtggtgaaggcagagggtggcctgcggcggcgcgagggtctatgggacacttaccgctggcactcgccggcgtgcaggatgagtgcctcgctgctcctggtgctgacggtcagctcatgctcggtggagttgaagacatccaggagcaggtgacactgccgggtactgcgttaaagaaaaaagaaagttcagaatcctctgacagccaaagaggaatgactttccctttttctcctctccaaagacttcccaccacttaagaagggcaaagtatatcgaaatgccaagtgctcctgggctcagaggattacggagactggttctgaacacgagtgtgaactctaaggagtgggtgtaggcatcaggtcctcatcaggtcctccttgggcccggggtcctggggacatgtgttcacagctcagccatgccttttaccaaccaagtggccttgggaaggtaacccgaattctccaaacctcaatatacactgacgactggaacacctgactctaaagtctgatcatctgcagagaaacacaggcatacagtgccattcaaggatgctgtgtccaagccagcatcttcagctaccaggttccacgctgggccctgaagcgtggtgacgcatgtcctgcttgtgtgtgtgtgtgtgcacatccagcacgagcttctcccatgcgggcacctctcgaactggggcagacactgcggggtctactcatcaccctccgaagcctctactcttttgtttcctctcctccagaggtgacaagtaaaatgctcaagttcccattgttccttgcaagggctggtccatgtggtgaagttctagccagtaaggcacagtcccctagagactttccttcccaaatacaaacgcgatgtcctgggagaaggcttttagccttccgccttcctcattccccttcctttctccctggaagcaaacaggatgctcagaagctcagtaaccatcagggacaaaaaccacaggctgtggatgacagagcagggtcggaggcgcttgagagccgtcacttctttgggtggccgtggcagccctgcactgccggcctctctctagccgtgtgagctccatgtacaaagtggaaaagtccagccccaaacgcgccgtccgtgtccgtcaccatctgataggttaacgtcacagttgaatgcttgccgaaaactcatacggtatctcagacaccaagtatcacagtcagcacgtaacaggtcatcgataaatgtctgctgagctcagtggatggctgcacccacgacaggacagacacagatgacagcaactgagcagaggccattcttcttggaagagcagggtaaacagttttcatggggggagaaaacacagagaaaaagatctgtgcactgggtcattattatcagcctagtgtgacttcaaaacatggccttccaaagggcatttgaattctcaaatgtatttctccaagtgggaggcaaggctttgctggctgttaaaggaaagtctggtcaaaggaaagggacaatcgcctgtgacttcatgacaacagcctcgggggtagtccgtggagccccctgcactggagacagaggctcaggagaggacagccatgctgctgtgatgcccgaggccctggatgcagagctcgaaaccctcggcttttcccaatagatgtggacctctattcattccaaagccacacatgtcctcggcaatttccagagagcagaactgaggtacagggggtagagtgacaggcccagaagttcacacacacacatatacactctcatacacatgcacacacaagtaggactttgtcaaaaggccacggggcatctgtgaaatatcaatttttcagaacgtgggcgtgtgacctgctctcaggcagaaagcaggaacatgtcaccatttctttttctttttttttttgacagagtctcactcttgtcgtccaggctggagtgcagtggcacaatctcggctcactgcaacctccacctcctgggttcaagagattctcctgcctcagcctcctgagtagctgggattacaggtgcccgccaccatgcccaggtaatttttgtatttttagtagagacagggtttcaccatgatggccaggctggtctcaaactcctgacctcaggtgatctgcccgcctaggcctcccaaagtgttgggattacaggggtgagccacggcacccggccacatgtcaccatttatatcatgtagcacagcgtcaacagggtgccgcacaccttgagatgacagctcccatcagttgagtctgggttttctgggtggggctgccttccccagaggtttggcgcttggaaaacattcattagctctgacagctgcctacaagaggcctcttcactcagctcacagaaaaatgagcttccgagaatgaagatctattcctctgttgtcataacttcatgaaatctttaatcacagcaaaatctttcatcagaaaagggaactcgtaaaacatttatcagaggaggaaaattgaagtgattttttaaaagcctggaataaaaggttcaaatatattttgttttcactcacagaatacggtgcttacgaaatggcacaggaatgagcagcatcaatacacaatgcatttctgtcctcttgctcttcttttttctgactcactgtctgagtgtgggggcgtctgatctagtgtttctattctttctaattgttgacatgatgatgtattggtggagcttggcttcctatctgtgaataagtttcctttcccagactgcagcagtggtttgtgccatcataatgtcatttattctgtgtacctttccatatggctttggatgcttggttttaaggctgatgctctgagcatatggtttaccttaattcttgtttgctttttgggtttgttttttttttttttctggacacatctgtctgaagtatggggaaatccaagaaagcttcctggaagagctgagaccaaggcgagcctctgaaggggacagacacgtttgcctggcttagaagacacaagggaacaaagtcctggcagcatggaggagcccagctattttgggaatctgtagtcaggttgagtgtgggagaccaggctgccaggtgaaaaaaataagccctttttcagcaaagagagcagttacgtattaataaaaccactctgatacagtgagtgggcactgtttcttcagccccaaattggagattttattaagtatttcatccaaaaaatacctcctgaggaactgaatgagaaacacaagatccctacattcatggctattatactcctgtgagggaaaagggcaggaccgatggggttgttttaaaaaataaaatttgctgtcattttttataaacttataaaaaaaagctgaaaaagattgttgaataaaagattaagacatacaatcaatcccagtcatacacatcaactaaaaacaattacaagacaaactttttgagaaaatacatttataatagcaacacagtccacaacacaggtagaaataaatctaacaaaatatatgcacgatatttatgtaaaaaattataaattcatggaacaatattaaagaagaaaaataagtgtagagatgtacaggttgagtatgcttggaccagatgtgtttcaaattttgtttttagattttggaatacctgcattatactcaccaagtgagcatcccaaatccaaaactcggagatgcaaaacactccaataaacatttcctttgagcatcacgtcagtgctcaaaaagttttgaattttggagcatttcaagttttgggatgctcaacccacgttatgttcaaagatggaaagacttaatatttttaaagaaattatctctttccaaatttctataaactcaatgcaactcaataagaaaaatcccaaaagggttttgttaaaacaatgatgtgggaggttttttggaaggaatctggcctactagatgtcaggaattgttataaggctgtaatcatgaagacagaggcacttggggcagtgacagagaaatacattagtgaaagaaaagatagctacaaagcagacccatgaatataaggaaactggagagatgattgtattggtggcattgattaattaggacaagagtcactgaatagtgctgggaaaaatgactatgcaggtacacagaaaattagatccctacctcacatcatatataaaaataaattccaaacagaatgaatagctaaatatagaaaaacaatatttaaaaatctttagacaaaatatagatgaacagttcatgaccttggaaaaaagaaagacttctcaaatgagttacaatacatataaaatataagggaaaagaataaaacgtttggctgcattaaaattaagaattttggtacaatgaaaaacatcaaaaaccaaagcaaagacaagcttcatttttaatgcgttgcaaatatcttttcacaggcatttgcaacatattaaattgactaaggatttgaattctgaatttatagagaactcctataaatcagtaagaaaaaaatgacccaatagaaaattaagcaaaggacaagaatcaataatttaaagtaggggaaacccaatgaccaataaacaggaacagaagctcaatccaactagtagttagagaaatggaaataaaccccaagagtattatttctcacccaacctattggaaatatttttaaagcgtcccagtaccaagagttggtcaagctatagatcaacaggaaatacgggaattcctgtcactgctggtagggatacaaattggtacaactccttcagacagaaaaagagtttgaccgaacaattccatttgtagctgcctatcttggatcaactcagagtttggtaaaagggcacattcaaaagttttcaatgcaacatcgtttataaaagtaaagaactgcttttaactaagtgcacatcaactggagagtagatacagacatacaatggtagagttatatgatggaaacctatgcagaggtgacaatgaatttaaaagaactatatgccccaccacagacaaatctcatattaaaactgctgggtaaataagttgcagaagatatacaatatatatgtatatcaaattttaaaatatgttttaaaatactcgatattatctataaatatcaaatttaagagtagtcattcatgctaagagagcaagagacacagtgtggaagaatatacagagctttaacagcatatttttatttctttaaattaaaaacataaaagcaaatataatatactgaaatattaaaaatggacaagtctgtatggtagacaaattgatacctcctagacatttatttatgtttcttatacttgaaatgtcttataaaaagttacttttaaagtcatttagactaatgtgttagcctgggatccccccagaaagcagagcctgagaaaagggtttgcacagagctagtgcttagggaagggatgccaggaagcatgtagagtaggcaaagtggggcagcagaggagaaggtgatgccagagggcatgttgctgtgtgtcgctgagctggcggccctgtgggcagctggggctcaatcatcgtccttctgtggagccgagaggactgtgcttcacactgtgcgcctgaggcacagaagaggaaataattgctctcccaactctttccctcactagtcaagctttcccccagaggggtcagttctctcacacttcatccatgcactgtgcagagagactacccatagccacccaaacctacagcctcagagaaggcagttagaatattccagaaagcaagagatgctcacgacggctatggtaaggtgctgtcaggtgacacctgcataaatttggttgccacggcaatagctagtctaaaagtgggctactatatgaggcagagcataagacatgtatgacacaactatttcttaaaaattaagtgagtctcttgacattaacacggatgttttaaaatgacttcagatctgatggtaaacaagggcctccctgaagaaatgatgtttcagttaggaatccaacaacaagaaagcaatcatgtgatggtcttggaggacagctttccagagagaatgagcagttaaagcaaaaatcgtaaggcacagtgtgatcaaggaacagaacaagcagagagtggtgtaggagtaaaaacagaggaaaggtcatggggaaatactcatatttcattccaagcaaaatgggaaggtattttgagagttttaagcagatgagtgacatgaattggtttgtgttaaaaaaaaaaaatggtgagttccaattctggaaaagatggagtaagcacaatctaccctgtctctcccactgaatgcaactataaatcatagaatgcactgagctgaagatgaagactcaaaaaataaatgttagaaggtggatcacagtaggagccagaaactgaagttattctgaactggcagtgagctgcatctctctccagtaccacctggcctcaactgaaaggcagcgtggactccagaggcgtgccctgcgtatagccagacagagctcccagggcagcctctcttcctggtccaacaagtgggaaaaggtactatgaagggccacagaaagtaggagaatccctgagtcttttcccttttttcttcccttttctcccagcccagcctcaaagcaaaccacaggagataatgacatcagagcagtattggcgggacaggctcacacacctccctgatacaaaccacctcactgacccaaagagctgaggtcccaaaaccagggggccagtttgcatcactctgatttccttctctgtgcctctggacagtcagtcctccatgtagacacacagagggggaagctcatatcctgcctttgtagcaggcacatagggataagagcccccagtaatttgggaagatttcagaaaggagattgattcagagagcagacaaagtcaagcatgaactcctaagctcaccagggagctgagcttgacagaatcagaccctcaagagcaaaccacgggctttgataactgatctccaggcaagaatgccgacgggcacccacatgcggctgatccaagaagcaccacaaatgctttgaaactggaactgcagcacagcctgcaaaaggtactctgcattaaaaaaaaaaaaaaaaaaaaaagtaccaacattttcctcagtattcaaacaagatcccaatgcctcccaatattatagtcaagatgtccagaatacgatctaaaataactcaacacagaaccaggaaaatatcaagtcatgaggaaaaagtaagtaacagacaataacttcaagatgactgtcttattagaaagagactttaaatgcattccaagaactgaccatacttgaaacaagtgaaaagacggaaaatctcagcgaaaaagaagatataaaaaagaaccagaaaaacttaagcaaaaaaaaaaaaaaaaaaaaaaaaaagaaaggaaagaaaaaaagaaaaattcaccacatggtgaattatcttagtaactgagaggacaagtagacataaaatcagaaagaatataagataaacaaaattaccattgaccacccagatctcactaatactcagagaacattccacccaaaagcagcagaataatcatactacccaagtgtacatgcaatatttaccaccaatcacattccaagaccatgggttgggggtggtgggggaactctaacaactgtaaaataaaaatcatacaatgtgtttttgggatcagtaaggaattaaacaagtaaatgtgaagatagattaacagattatccaatggaaacaacaggggaaaataaaacagaaaaaaaaaacactcttatgggacaacgaaacctctaaaaatcacgtcacaggagactaagaaacaaagaagaaaataacatgccatttttaaataaataatggccacacccccaaaaagaattggcaaatgacataaacagattcagaaacccaaaaagttttttgtttttgctgttgttgctatttttttgtttgtttgtttgcttttgagacagagtctcgctctgtcacccaggttggagtgcaatggcgtgatctcggctcattgcaacctctgcctcccaggttcaagcgattctcctgcctcagcctcccaagtagctggcattacaggcacacaccaccacaccaggctaaacattttttatggtatttttagtagacacgggattttgccacgttggccaggctggtctcgaatgcctgacctcaggtgatccacccacctctgcctcccaaagtgctgggattacaggcgtgagccatcacgcctgacccaaaaactattttttttaatccctgcctggaaacataatcaaactgcagaaagctaaagaacagaagccatctggaaagctgccagagcaaacaatacatcctgcacagggaaacaatgaattctacacagaggagacaatgcatcctgcacagaagagataatgcattctacactagggagacagtgcatccttcataggggagacaatgcaaccctcacaggggagacaatgcaccctacacagagaagacaatgcatcctacccaggggagaaaatacatcctacacagggcagacaacgcatcctacacagggcagacaacgcatcctacacagggagacaatgcatcccacacagaagagacaatgcatcctacccaggagaacaatgcatcccacacagaggagacaatatatcccacacaggggagacaatgcattccacacaggggagacaatgcattctacacaggggagacaatgcatcctacacagaagagacaacgcatcctacccaggggaacaatgcatcctacacaggggagacaatgcatcctacacagggagacaatgcatcccacacaggggaaacaatgcatcctacacagggagacagtgcatcctacacaggggagacaatgcatcctacacagggagacaatgcatcctacacagggagacaatgcatcccacacagggagacaatgcatcccacacaggagagacaatgcatcctacacaggggagacaatgcatcccacacaggggatacaatgcatcccacacagggagacaatgcatcctacacaggggagacaatgcatcccacacaggggagacaatgcatcctacacagggagacaatgcatcctacacaggtagacaatgcatcctacacagggagacaatgcatcctacacaggggaaacaaaacaacaaatttttctaaagtctgaagaatcctcataaaaaaccacggagggcagagaaagtgaatcatttttaaaatgctgaaagaaaagaatgtcaactcagaagtccatatctattaaagtatctttcaggaataaaagtaaagacattctcagataaaggaaaattaagaatctcagtcatcagtagaacttttctaaaagaactgggaaagaaagtcctttaaacaaagggtgaataataatacagggaaacttgaacacgaagcaaaaagagtaacaaaaatggtaagtatctggttaaatgtaatttcctattaagttacttaaaagatacacaatggactgggcgcagtggctcatgcctgtaatcccagcactttgggaggccaaggcgggtggatcacaaggtcaggagatcgagaccatcctggctaacacggtgaaaccccgtctctactaaaaatacaaaaacaaaattagctgggcgtgctggtgggcacctgtagtcccagctacttgggaggctgaggcaggagaatggcgtgaaaccaggaggcagagcttgcagtgagcctagatcacaccactgcactccagtctgggcaacacagcgagactccgtctcaaaaaaataaataaataaataaaacaaaacaagaaaaaacaatgaacgatatatgatgaatacaagctaaaattataacattgggtttacaatgtatacagatttaatacattatacaactaagacatgaggaggggaaagataaaagcgcctatatttgagattccaccaagtgataaaatattatttctaagtcaactgtgaaaatctaagagcacttattatactccctagagaaaacactgaaacagctctacaaagagataaagttaaaagctcaatgctttaaaaatcaaatagtttaaaagaacataaaaaaggagaaatggaacaataaacaacagagtgaataaacaaaaaacaaaccaaaaatacaatggtagacctcagttcaaacataccaagaattacattaaatataaatgacttaaatagtctcattaatagacagagattgtcagaatacgtttaaacaaaaaaaaacactcaactatatgctatctataataaatccactctaaatataatggtatagatatgttaaaagtaaaagaatcatgccaagaaaacacgattcaaaagaatactgggctgttatattaacatcagacacctaaagagggacattatataatgataaaagcattaattcaccaaaaatacacaataattattaatgtgtatgaacctaactatagagtttcaaaatacatgaaataaaaaactgaaaggatgaatgaaccaaatcacaattagagacttcaacactcttctctcagtaattgatagaacacagacatgaaatcaataaagacataaaagtaataaacaccaccaaccacttcatactgattgataattagtgaacactccacccaccaagagcagaatatacatacttcccaagtgcacagcaacattcaacaaggtagaccacattctaggccacagaaaaaatcctgaactaatttaaaatataaagcatacaaagtatcttctctgaccaaaacagaattaacctagaaatcaatggtagaaggaaagctagaataactccaactatctggaaatttaatcaatgcacttcaaaacaacccactgttcaaagaggaagccccaagagaaataaaatattttggagtgaacaaaaataaaatatgatatatcaaaattctgtgactggagctaaagcagtacttagagaaaaatccatatcattaagtgattatataagaaagaacggcttcaaatcaataagcctatcttctatcttaagaaacgagaaaaacatggtactggtaccaaaacagatatatagaccaatggaacagaacagaggcctcagaaataacaccagacatctacaaccacctgatctttgacaaacctgacaaaaacaagcaatgggaaaaggattccctatttaataagtggtgctgggaaaactggctagccatatatagaaagctgaaactggatcccttccttacactgtatacaaaaattaattcaagatggattaaagacttcaatgtaagacctaacaccataaaaaccctagaagaaaacctaggcattaccattcaggacataggcatgggcaaagacttcatgactaaaacaccaaaagcaatggcaacaaaagccaaaatagacaaatgggatctaattaaactaaagagcttctgcacagcaaaagaaactaccatcagagtgaacaggcaacctacagaatgggagaaaatttttgcaatctacctatctgacaaagggctaatatccagaatctacaaagaacttaaacaaatttacaagaaaaaaacaaacaaccccatcaaaaagtgggtgaaggatatgaacagacacttctcaaaagaagacatttatgcagccaacagacacatgaaaaatgctcaccatcactggtcatcagagaaatgcaaatcaaaaccacaatgagataccatctcatgccagttagaatggcaatcattaaaaagtcaggaaacaatagatgctggagaggatgtggagaaataggaatgcttttacactgttggtgggagcgtaaattagttcaaccattgtgaaagacagtgtggcgatccctcaaggatctagaactggaaataccatttgaaccagcgatcccattactgggtatatacccaaaagattataaatcatgctactctaaagacacatgcacacgtatgtttactgcagcactattcacaatagcaaagacttgaaatcaacccaaatgtccatcaatgatagactggattaagaaaatgtggcacatatataccatggaatactatgcagccataaaaaaggatgagtttatgtccttttcggggacatggatgaagctggaaaccatcattctaagcaaactattgcaaggacagaaaaccaaataccacatgttctcactcataggtgggagttgaacaatgagaacacatggacacagggtggagaacatcacacaccagggcctgtcacgcacaccaggggggtgaggggctgcggggatagcattaggagaaatacctaatgtaaatgacgagttgatgggtgcagcaaaccaacatggcacatatatacctatgtaacaaacctgcacattgtgcacatgtactctagaacttaaagtataataataataataataaaaagaaaccggacaaagaacaaatgcttaaaggaagcataagaaggagataataaagggcagaaatgaattaaaatgaaagcagacaaatagaaaaatatcagtaaactaaaaaactgatttttaaaaagatcaatgtaattgataaacctctagccacaattacaaaggaaaaaggagagagaacacaaatgaccagtatcataaataaatgagggaataccacttcagccacagacattagaaggacaataaggaaatactacaaacaactctcctcacataaatgtgacaactcagatgaaatggaccagtttcttgaaagtcacaaactacaaaaatccatccaagaaagcacttatccactgctagtagtgatggaaaatggtactaccactctggaaaacagcttggcagtttcttacaaagttgaatagtgaaaaacacatcatataatccagtaatcccagtcctaggtatttatcctagagaaatgaaaacttaaataggtagcctgaaaagtcctaaatcaattaaataaattaaacatattgttttaaaaatcattctgaaaaagaaatctctatgcccagatggtttgcttatgcattctaccaagcatttcaaaaagaaataattctatacaaaatagcagaagaaacacttctcagaacattttacgaggtcagcattatctaataccaaaaccagacaaagacggaagaaaaaacgaccacaaatacccttcataccaataatactcaacaaattttttgataccaaaaaaagcatctgacaaaactcaaatttcattcatgatttaaaaaaaaaagcactcacccatcaatagaaaaaaaccccttaatctttaaaaaatatggacgctaagaagtacagaatgctgatgaataaaatcaaagacctacataaacagaagtatatgcagtgctcagattggaaggtgcaatatacttatccatttttcccaagttaattcatagatttaacaaaattccaatcaaaatcctagaatgacactgtagatgtagacaatcttatctgaagatttatatggaaatacaaagaaacaatagacagaacaattaaaaataaaagaaaaactctgaggactcagagttttagaggattcgacccaattttagtagtaaaagatttactgtagggtacactaacatagtagtaaagacttattctagggtacactaatatagcagtaaggacttactacaaggtacactaatcaggacagcgttgtactggtgaaagaatatccacatagttctctggagcagaataaagtgtccagaaatagaattacacacagatacagtcattttatttttgactaagaagagaattcaacggagaagagataatccattcaacaaatagtgttgggacaactggattccacttatcaaaaaaaaaaaaaaaaaaaaaaaggaaaagaaatttaaacttcacaatttatacaaaagttactcaaaacacacaggtaaatgcaaaacaaaactgtacaattttacaagaaaacataaaagaaaaaaaagcacaaccaaaagtaggatccaaaaaaggaaaattagatttattaaaattaaaaatatctctctgtgaaagacactgttaaatgaatgaaaaagttacggaattgaagaaaacatttacaaattacataccagataaaggacttgtatctataatatattttaaaaacttttgaaactcaacatcaagaaaacgaataacctaataaaacattgggcaaaaagacttaaaaaggtactttaccaaaaagccagaaagacaacaaataagcacatgaagaaaggatcaatgtcattcatcactaagaaagcacaaattaggccgggtgcggtggctcatgcttataatcccagcactttgggaggctgaggcaggtggatcacctgaggtcaggagtttgagaccagcctggccaacatggtgaacatgtttgtgaacaacaaaaaccaaaacctcgtctctgctaaaaatacaaaaaattaactgcatgtggtgccgtgcgcctgtagtcccagctactcaggaggctaaggcaggagaatcgcttgaacctgggaggcacaggttgcagtaagatgagatcgcaccactgtactccagcctgggtgacagagtgagaccctgtcacaaaaaaaaaaaaaaaaaaaaagtgcaaattaaaaccacaggaagatatcactatatgcctattaaaatgggtagaaaatcttttgaaaactgacaataccacatgctgatgaggaaacagagcacttatccactgctagtagagatggaaaatggtactaccactctggaaaacagcttggcagtttcttacaaagttgaatagtgaaaaatacatcatataatccagcaatcccagtcttaggtattaaactagagaattgaaaacttaaattcacaagaatcactctacatgagtatttacagcagctctattcataatcacaaaaagctggtaacagcctaaatgtcctttaaacagtgaatggatccacaggctgtgacatacctgtacaacagaaagcaactcagaaataaaaaggatcaaactgttgacagactcagtgacacagacagatcacagaatgcagaatcaaagaagccactccaagaaaggaacacacagtattattccatttataagacattctggaaaaaccagactatagagatggagaatagatcagtgttgccacaacggtggggccggggagatgcagagcatgattctaagtggcagtgtgtgaagtgttgcgggtaatggaactgttctttatcctgactgtgatggatacaccaagctatctgtgttgctcattaaagttagaactcaaaaaatcgtgcaccaaaaaagttcattttactctatgttaatttaaaaaacatttaaatcaatgcaattaaaaaaacaaacatcacgatgagtttgaaggaccacagtgcattaagtttactccaatactggtcttgttgcttaatggctataacatcataagcaagtcatttaatttctctgactgtcagtttccccagtcctccaatggggataacaacgcctatgctatggaattattaggaggctccagtgaaaaaaagtaagtgaaagtgctttgtaaaatcacaagaagaataccactataaacatggggggtggggctattattagcttggttgctgtcagtggagctgcaaaacctaccagccaatgactcaatatcgactcagctaaaaatgagtacccgccaaggtccagcatgtctaaaaaccatggtgccatgactagaaatcaagtgagactctcttttccccaagtctggcagatatccccaaggcctcccagggtctagacaccaatgtttgctcattcccaggagtgtactaaagtgaattagcataaaactaaaacaggtagtgatggccacccacacctttggtcaaattcatgtggtcttttaaaattctgtaagcctgcctatcttcttaatcagtcttctttccagaatgggtagtcaatatgagactggagagctttttcacattttaagaaagccagggaacctaattcaatctgaagtccagagaaaacaaagaacaaagaatcagagggttttctgctgatgtaacctcacgcttacctctgccacactgctatggagcttcctgatctcacggaggactatgaatgactacctatctaccagatcagggtttctgaaacatagcacaccaaccaccaaaaaccaaaccctcagctctagataagactcaatgagttaaaacctctagcagtgacaccagggactctgacttctctgggtttgggcttcactgtgcaagctgaacctgcagagtaggaaggtgctgaaatctctatggggaaggaacgcagcacacagcaccagcacatgaagcacagcagcgtgggcaccagtcagggaaggttccgaaaggaagtgactcctgcactcacaaaggcactgagtataattctaagcggcagcctggtgaagttttgggggtaaacgagcaggtctactagggagagggctctctagtcactgtgaacagtgtttgcaaaggtctcaagctcaatcagcacggcttattgggggaaacttccaggaccttcctcacaggagtgaggaaacgtgggttttgggaagacaagggagaagggctgggtcagattatgggaagtcttgggtaccaagctctagaactggaacttgacctacagatgatgggactcactaaaagacattaagaaaatagggggaaaggtcttagccagccatggtggtgcacgcctgttgttccagctacttgggaggctgaggcaggagaatctcttcagcccaggaggttgaggctgcagtgagccatgatcacaccattgtactccagtctgggtgacggtaagaccctgtctaaaaaaaaaaaaaaaaggaggaggaggaggaggaggaaggaaaatgtcatgtatgtcttttagaatactttggaatctactgacagaaataattgaaggaagaaattgaaggcaaaatgactgtgaaaagttgtcacaactattcaagaaataaattaggaggcttgtcctaggggacaaaggtgacaagcctgagtcaacacatggctattcaagtaaaaagaacaggtttagtggcagatgggaacgtggtggcatttccccatcaacaactgaaaagcaacccagtctttgtgaagggtctctgaagctttacattattgaagacagtaaggataactgtttctaattttttaattaataaactttaaaaatataattttttaaatgttcccttaagagaaacaatttggaatggctggaatcaaaaagatagatacaataacaaatattggcaagaatgtgcagaaatcagatactcatatactatgggaatgtaaaatggtgcaaccactttggaaaacaatccagcagctccttaaactatttaaacatagagttaccatatgatccagcaattccactcctaggtttgtacccaagagaaatgaaaacatgcatccacacagaaaattaaacatgaatgttcataatagcattattcacaatagcagaaaagtgcaatcaacccaaatgtccatcaactaatgaatgaacaaaattatatccattcaacagaaaattattcagcaataaaaagaaataacatacataattgtggttgaatcttgaaaacaacacaccaagtgaaagaggttagtcacttgtttccatttatatgaaatatctagagtaagcaaatctagagagacagaaggtagattagtggtagattagtggttgcctagggtgcgggagggaagtaggggaatagagaatggcagcgatgggtacagggtttcttctgggaggatgaaaagttctaaaatcagattgttgtgacggctaaacaactctgaatatactaaaacgttgaattatacagtttaagtgggcgacttatgtgacatgtaaattatatttcaataaagctgtttaaaaagaagaaggccatttgagatcctgagtgtacaggaagcaggggcgcccaggaattggaggaagagatccaccaaacacactcaaggcgcacacagcaatgcttcatctctcaactgacccacacgcagtgccatagttgttgaacaaacagttgaaactttgttacactgtctaatttgtgcccacgagggatcactggttaaagaggagagccatgaagaacgcacgtaatcaggggcaataacagtaactctgcaattgtgcctccgggtgacggtaaccaggtctctgagttgcattcatctaatcaaaatccatttgcagcacatcaagacatttgtaaggcctcaaaatacaacgtttaaaatataacatataatgatgattatgtctaattttgctttttgttttctgggaattaagacaatccaaattcacaagaaattatttgtagaaaagtacttgcaaataacaacctgaaatcatgtttcatgcatcaccatttggaaattaaactctacaatgattaaacaaagaaacgaagagaactttaaaaatgcaaaatgcaagaattccaaacataagtttgaaaagaaactctgactaattgatgatgttgcacaatctacctttcaaaatacattcaatctccaaaccaagcatggtatacttttttttaattgatgtttataaatcaggctttgaaatgtatttaaaagtatacagtgcttatcaatacaaaatctttaaatctgttattattttaaaatgaattttaacatataatatttagtaatataccaatctaaaataaaatatagatcacgtaaaattcttgcttttaatagtaatatgcatcagtaaaacataaaatgggtcctctcaagacagaccggtgagcagacacagaatactgtgagatcattcgctaggagacagtgcagttgcttggataacaagtggatgacacatggaactcgggagcactagttatggagtcggtgtcagtccagatagaatgtcaacctgctcctgccgtgtgaaggctgggtgccagctcctgccctccacagagctataatatattaataataggaatggcaacaaaatgtgtgttcatcatctcagggcacacaagacaataggtaagggatgggatgaagcagatacattgaattgttaagttcccttccaacaagagggtctatgaattgactgtgatggcaatttcagggcagggtgctgcgtggagcctgtgacactggttccagtttgttctccagcctccttttctcacaaaagcaggtctcagtgcagatctcgcagcatctcttcttcggtcttccttggggagcttctcaaagcacagccctatccctctcatcaaccaccacgaaggattcgccgactgggctgttttctctgcaacttccacaacgaagaggggagccccttaccttgccctggaatattctttctgaggatttctgagaggtaaagcagccactgatggcagcgtccagaggataacagcaccgtcaaagaggaagcagggcgacagcttgcttggcagacccagcctggcttgatgctgcgcatgcgctggacaaacagcaggcacagggcacaagggtcgagagtaaactccgccctcacctgcggctgttgtgaccacctgccacctcctggcctcccagacctcgtctacatccgatgcctcattatagatacagaatggtttttttagaaaattggaaagttgatcagacttttaaaatatcacaaaggagtcttaatgtggcgtttaagataattcctttcaatatttattttctaaatatcccagccacagacctgaagagtttatatcccagtaggaaaggctgggtatagggtgcatagaatttccccatacatctatttcttttgcaatttcttgtgaatctatcattgtttcaaaataaactgaaaaaaatgacatgggtctgaatcaaaccaagagaatctaaaaactgtttctatttttagtcatctaaggacgggaaaagggaaaaagaggtctacggtcctgtagctccttccaggctttagaagcataatggaattggaccatttttgccctgtagaaatgtacttatcatgaaaaaaaaggaaagtcttaagtccttgatacttcagaagaacatccatagactcccccatttgtacactaggtcaaccaacatttaacatcacttctgtggttcaaatatggtgctcttgttataacagcagactgatattgtcaagacatcacaggacaaatgagcactggcccagcttactatgctcattttaacaagtacagtcagcaaggatcaggaaaaccaatcatgtatatgatttaaatgatctaaataaaaaatagtgaaaaatattttacatttatttatactttgtacttattaatttagcaacagatttgtacaacctgtccccctaccatcttccccttctcacacacgacgtccccatttccacagattctcaggacaaaggccttggagccaccacacctcctgtgaaatagcaaggcttagcctatttaatgtttgttctgaggatatccagaacctgaccattctttccaccttgacctactcctgtcccagaattactgcggcaggactgacatccactcccgcccgtggcgcaacagcacattctctgaaagcagctctccagcttttcatagcacgtcccccctgctatgctgatgtttgctgtctacacaacctgctacatttatgcttctcgcctatccttctccattcaaatataagctctttgagagcatgaactcaactttactcattgctgtcttcagtgcctaggacagtgcttcgcagaaaatagggtgcaaggagtattagttccaaggagggagagagggagggaagatgaacgctatgctggtgaggctgcggggaaccaggtccattgatgcaaacttcactgtactctataccaagaatttctgatgaacaatttaaaatgacagaccaaaatctagaaattacttatgactttttgtaagtcttatttcattatttatttataccatgaataacaaatcgaaatttaatttttaacagttttaacaactaaatttgtggaatactttcaattttagattttgtaaaatcttagatttttgcaatttaaaaaattagttcccaatatcacaccatctacaaaaaacatatgaaagatggatgaataatctcaatgtaaaattacaaatatattagcaggaaatcaaggagaacacatgtctaatcttaagtagggtaagttttttttactgaagcccgaatgaagccaataagaacaaaataattttactaaaaatgttcgcaaaaggtgaccaaaataatttgtagtaaaatgcagatagcaaattcagataaggttaaaatatacggcacacaaaacttcctgaagatgaatggaaaaagattaatacaaatttttgaagaggccaagattacatataagagaatacacagaagaaatgcaaatgttcagtaaacataaagatggtttaccttactcaaaactaaggaaattaaaattatacacagtgagatatttcacatccatcaaactgcaaaccttcatgaaaagaatgagatattcaatgatgtctatgatagggagaaacgaacagtctcacatgctcaggagggtaaattatggaggaagattccatattaaaactaaatttttagaatttatattacaaaaaccacccacgtatgcacaaagtttatatacaagaatgtccaatgcaaaactgcttgaaacagtagaacatagaaaacaaacctcactcaacagagaagcatttaacacattatggggtatctatcggacagaagggcacatgatctgtaaacaaatgaggagacctagatttactgatgtggaaagatgatcaacatgtatcgtatttttttaatttgcaaaagattaaaattttacttctattttaaaaataatggtaacaggcagggcatggtggctcaagcctgtaatactggcactttgggaggccgagaagggagggtcccctgaggtcaggagttcaagaccggcctggccaacaaggtgaaaccccatctctactaaaaatacaaaaattagctgggcgtggtgaggcaggcgcctgtaatcccagctacatgggagactgaggcaggagaatcacttgaacccaggaggcagaggttgcagtgagccaagattgtaccactgcactccagcctgggcaacagagcaagggtcagtctcgaaaaatttaaaaataaaaataatagtaacaatattatatatatttagatgaattaaaaatttggaaaaatttgtgtcaaatttttaataatgggtgtctatgtgagatgatattgcaacagatactcgtctctacttaacatgcttccagaaggcatactttttttttttttttttttttgagacggagtctcactccgtcaccaggctggagtgcagtggtacaatctcggctcactgcaacctctgcctcccgggttcaagtgattctcctacctcagcctcccaagtagctgggactacaggtgcatgccaccacacccagctaatttttttttttttttttttttttttttgacggagtcttgctctgtagcccaggctggagtgcaatggcacgatctcggctcactgcaacctctgcctcctgggtttaagtgattctcctgcctcagcctcctgagtagctgggattacaggtgcctgccatctcacccagctaatttttgtattttttgtagagacagggtttcaccatgttggccaggctggtctcaaactcctgacctcaggtgatcctcctgcctcagcctcccaaagtgctaggattacaggcatgagccactgcgccagacaatttttgcatttttagtagagatggggtttcactatgttgaccaggatgatcttgatctcttgacctcatgatctgcccgccttggcctcccaaagtgctgggactgcaggcgtgagccaccgcgcccggccaggcatacattttgtataacaagtttgaatgactagcttttagaagaaagaagtggggggaaaaaacgtattattttatataatcatcctactatttatagataaggcaatgcggggctcagagtatctaagaggcctgttcaaggcaggaagtagagttccatcccctctaatttcaaatcctttcttccctccacaaaatcaaggtaccctgccacagttatttactatgtccctatcacgtgccagtcatctgagagacttacttaaaaggggagacacagaaaagacactgcctgtaacatacctgtaaagactgagaatgagagggaagaagggcgtggaccccatgcgctgcaggcttgccacgcatcaggcacacagtttcttactggaatcctcccgacagcccgataaggaggcccgctttataaagattctgtaacttgcccaacatggcagagctgggattccaacatgaggcagtcagcctccaaaacccaggtcctccacctctcggccctcctgcatcctgctggtcaggccgaggccccccagtgactagggtcctgatgcagccacgaacaacaccaagctcgttctttcttctcactctgcctgagtccctcacctgcaacacggggcaacacgttctctagcccacactccctagcatgtcaaatgtacaaggacaggcgctgaagtctcccatgagcctctgaaggggattgagggactacctcaccttgcagagggtcaccgtaagttctgaaaagtggcaacacctggaaaatgcttcctaaggaagcaaaggggttacagggagagcagggtgtgtagcaaggcaactggcacttagtgtgtgctcaataaccatccagatccagttcctttacacacactgagacgacagcgcctcaacacctacatgcacagggctgagcgggccacacagaggcaggaagaacgctaacagcctggtcaatgggaccctaagtgtaatggataattaatgcttttgtgaaaagatgctgctgctcttgggtacctgctcggcaggtaagggccagatggagttcaagcccatcaagcccatcacagtcgcagcagctgggttccactcggaccgtgaccccgcctctccgtgcactcctccaggaacctgtctgtactggggctccaaacttctcccttctccagcactgcacttcctgtcaagccactcctgaccctaaggaaaggaaactgtactccccagtcgtctaaacaaacaactcaaatcccactgtaggtcctccggctggtcaacgcaaatctagttgttctgtctccaaagctcctgccacacatcgttcacactgcagcgtttcttcaaaacttcggttgaccactgactacttacttcacctgctgctgcccaaacaaagagtcacagagtggctgccttcagagagctgaccataggtgaaagggaggccaacaaaggcttcaggatccgctgaggtcagtgatgtccttcgggagtgctggagccagctgctgcaaagccgcctgtgtttacaagactggctcatccctttgtccctagaacctgacacacaacagaagtgcatacacacaaggaaaatgacaaccaccaattttcaattatctgccttgtgtcaggcactgttaataatttttcagacactttataacacacagttttacaaccctgcacagtcagtgttatctccttttcaagatgaaggaaaaatgatgctgagagaaatgtgaatggctcgctcaaaaccacagcgccaatgagcaggagaatcaacactggaaatcagatacaggcgcatggggctctcactcctggtgtgcactgcaattctaaattcttgttaaatttaaaaccaatctactaagtaaacatagcaactggaaaaagatctaccacgataaaactccacagtgccccttccatgggtgagctgtccccaccacacagggaaagtgacgaaggcctcggtggcagggtgtctatcaataatgtcgtaacgattacaccccacgccccgctcagaggagtgtattttccacatagatcagagtagaaatgtctaagagtggatcgtttattgtaacaggctagaaagaaattgctcctcaggagagagggaggctcggcactcagacagggatggtccagcctaatccatttccatctcgtccctaacaaggttaccaggcagctctgtgtaaaaagcaaatctcaaaggtaatttgatcttttaaataaaagtcaactgagacctatgtactccctggtgggagaacagtaaaaataataataataataatgagaattctacctatctatattgggctttggcatttagaaaaaactgccccctctgttatttaaatggattctcttatcgccctggtgaggtgagcagagctaagaggctcactctccccctagggagtgcagagaccaagctgcggcagagaaacacactcctccaaagatacggctcctacaaagggtctgtccagcggcagaatagacaccagagtccaggactccaggctcccaggtcagagcaggtgtggcagcaagctttggtctgggtgtccccaaggccacagttcagattgcctcccttccactcacgaacgcacaggacaaggtgaggaatgtaacacccccagataggaatgccaatgtcagagggttctcgggagtgtgcatgggatgcccgacgcaacacccagggcatgccctggagtctagcaggccgtgaataaataggactgctcttccttcccatgctctcatatagaaaaccatcattttaaaaaataccaataagaaaaactgcagaaattatcagtatcagtgagaggagcagacaaacagactaccccaggagtaaataactcacatccatttgtattttggtttcacaatagagtatatgattcatgttatgccagcagtaaagtagtcctttgacatatatttggcttctatttgcaccaaaattagtctgaatctctgtgtaggctcgcactggcatgtatgtggccatcttcattgtccatgctgcagtggcctggaagccaggacatctagatgccagccctgtcacctgcaagctgtgtgaacctgagcaaatcagaaaactctccgggcctcgtttgtgatgcaaatgtgttgaaatgggccatctctggggatgcatataactctaacatggcgtgatgccagagtacaaatcttcacctgtgagcaaaatgaaaagtaatgaattcacaatacaccatgcatcacgtaacttcaataaactgcaaaggccaagagccgaaaatgcatactaattctgttgtgttccaggccttgcaatttacacaggtccctattaagaaagatagaatttagcactttgggaggccgaggtgggtggatcacttgaggtcaggagttaagagtccagcctgggcaacttggtgaaaccctgtctctactaaaaatgaaaaacaataaaaataaaaaaaaaataagccaggcacggtggctcatgcctgtagtcccagctactcgggaggctgaggcaggagaatcacttgaacctgggaggcagaggctgcagcgagctgaggttgtgccactgcactccagcccgagcaaaagaaaagaaaaatagaacttaaatatatatataaacggggtcatcccttttatacaaaagaaacacctgaatgaatagagccttggtattttacatcctgtcattcctacaccttccccggctgcccaccgtggggcaaggcgctaggtcctgggaggcagaggttgaccacctggctgcatgttccacagagctcaaaatccagtggaagaaccagaaacccaacattaacacctctcctgttcctcccactgtgggtggtgaaatccttctttcctcaagaattagtacaacgtttcatttttttgtgatgcctttccagctctccccagtaaaaattaggtgctctctccaacgtatatatattttcgtacatgaaatgttaaatcaaggttaaaatttacatacaacgaaatacacaaatctgaagtgtatactagtctgattatttgtctacaaccctataacccatacccctatcaatatatgcaacatttcatcaagtcagaaagatattttctcttccctttagggcgaccaactgtcctggtttgtactgaggactttgctagggtgagggaatttcagagctaaaatctagaaaatcccaggcaaaccagacagttgctaacccaaatcccttcccagtcaattcctgccccacgttaccttaacccagagtcaaccactggttagatttctttcatcataaaacaggttttcctgttctagaaaggtgtacacatggagtcacacagtatgtttcttttatgactcgattcctttgaccagcatcgtaactttgtgctgaccccattttgttgcatgtaccagcagtttctatttctgaggagtattccattgtgtggcagcaccccacattgtttattcatttacctgttgatgggcatttggggttgtttccagtttggagttattaggaataaagctgttacgaaaatacttgcaggagtctttttgtggatgtggacttatatttctcttgagaaaatatctaggaatgaaattgctggatcactggggaggaatatgttttaattcatgaggaactgcctgactgattttctaaagtggctgcaccagtttatactcccagaagcagtttatgtgaattctggctgtttcacattctccctaacatttggtgttctgttttttaattttagccattctagtgggtatatagtagtatctaattggggttttaattcgcatttctctaatgattaataatgttgaacacttttcggagataacaggtcatttgagaaatatctgttcaaattttctatttatcacctttttagaattgtacaacttcatcaataagatacaagacgtttgttacataaatatgttacaatttttttatcttagaatgtaatttgccttttaataagctgaagtttttaattttgatgaaatttgtcctatcaagtcttagttttatggttagcagtttccggccccatctaagaaaatatttgcccctaaatcaagaagatactgtgctacattttctttgagaaggcttgcagttaaaggttttacttttaggcctaaaattcatctccagtgaattcttgggcagatgtgatgtatgggtgaagggttgtttttattcccccacacagacgtccagttgttccagcatcttttattaaaaagacttttctttccccatgaaattagttttgcatcttgttaaaaatcaactgatgagatacaattggaactatttctggactatctattatggtccattgatctctttttctgtctttacaccaataacatactctcttgattattatagctttacattgtcttaaaatcatacagtgtaagtcctccaactttgttcttttttgtcaagttatttgtctattctaggtctgttcaatttcaaaataattttataattccactaaacaaaaatcctgctaggattttgaccgaattgcattcaacttacaatcagttcggggaaaaccactatcttaagaaaaactaattcttccaatcactaagcatggtatacttttttttttgatacagagtctcgttctgttgcccaggctggagtgcagtggtataatctcggctgactacaacttccacctcctgggttcaggtgattctcctgcctcagcctcccaagtagctgggactacaggcatccaccaccacacccagttaatttttgtattttttagcagagagtgggtttcaccatactggccaggctggtcttgaactcctgaccttgtgatccacctgcctcggcctctcgaagtgctgggattataggcatgaaccaccgtgcccagccacctctctaattatttaagtcatctttcatttctctttatcatgttttgtcattttctaggtagggataagatttgtagaaatgttttcctaagtgttttattattttgattctactgcatatattattttttacatttcattttcaaattgttagttgctggtatatagaaacgtaagtgatttttttttttttttttgagacggagtctcactctgtcacccaggctggagtgcagtggtgtgatcttggctcactgcaagctccacctcccaggttcacgccattctcctgcctcagcttcccaagtggctgggactacaggtgcccaccaccacgcccggctaattttgtttttgtatttttagtagagatggggtttcaccgtgttagccaggatggtctcgatctcctgaccttgtgatccacccacctcagcctcccaaagtgctgggattacaggcgtgagccaccgtgcctggccacataagtgatttttaaatattgagtggcatcctgcaatcttgctaaattgacttattatttctactaatttctttggtgtggcagatttctcacaatatttatgtacataatcatatgtaccatacaaagaaagacatgtgaataataataattttatttcatttcctattttaatacccttatttattttcttcccttattgctctgattaggactgccagaaaaataatgaatacggtggaaacgtgccttgttattcttagagaaaaagtcatcagactttcacctctaagtataacattaactgtggggtttcttgtagatggcctttgtcagactgaggaagttctcttctaatcctagtgtactgagtgtttctggcataattaagcattgacttttgtcaaataatgtttctttatcaactgatataatcatatgatttttctcctttattctgctaacatgacaaattctaatgactgatctttcaatggtaaaacaacctcatacttctgagtaaaacctgaattgttcatgctgttttgtccctttcatatatcactgaagttgatttgattttttgttttcatatttcacatgtatatacatgaggttattggtctacagttttcttttctcataatgtctctgactgggtttggcatcaaggtgatgttggtatcataaaatggaagttgggaagtatttcctccttattttctgaaaaagtttttgtaaaggtgatattatttctttctttaaaaagcttcatatatttcagagtagagccatctgggcctaaagtttgctttgtgagaagattttaattaagaattcaaaatctttaactgatgtgtgactatttattttttctatttctttttcctgtgtcaattttagtaatttgtgtcttttttttttttttttttttttttttttgagacagaatctcgctgtgtcacctaggctggagtgcagtggtgcaatcttggctcactgcaatctctgcctcatgggttcaagcgattctcatgcctcagccttccgagtggctggaattacaggcatgcaccacgtgcccagctaatttttctatgtttagtagagatgaggtttcgccatgttagtcaagctggtttcaaactcctgacctcaggtgatccgcctgccttggcctcccaaagggctgggattataggtgtgagccaccacgcctggccgtcatttttcttctttttaagagacaggcaccttctctgccacccaggctggagtgcagtggcacgatcgtaggtcactcaaggtatcctcctgcctcagcctcctgagtagctaggactatagggatgtcccatcacacccggctaattttttttaatgttttgtatgttttatgatttttaataatattatcttattatccttttaatgtctgtggaattagtagtaatgccacctctttcattctcattattagttatttgtgtttccacatttttttctgaccaccctagttacaatttattaattttattgttactattttcagagaaccaactgttggtttcaccaactttatgaatttatttgttcatactctatagcactgatatccactctattatttcttctgcttactctaggtacattttgctatccttatctaataaagaagcaatatcactgattttaagccattcaccatttctaatacaaacatttactgtattataaataacaactaggcactttcggaggttgaagcaggaggattgcttgaggccaggggtttgagaccagcctgggcaagacagtgagaccccatctctaccaaaagtttaaaaaataaaccagttgcggtcctctgcacctgtagttttagctacttgggaggcaaggcaggacaatcacttgagcccaggagtttgaggttacagtgagctatgatggtgccagtgcattcccacctggacaatggagtgagattctatctcaaaaaaaaaaatacacatgtacacatacaaagtaggtggagctgattaaaagaattgtccaagttttctatattgttactaatttttttgtctacttattttaccaaatactgagagataaatgttgacgttttcaactaccatggtggggttatcaatttctcccttcagtatgtcagttttactatgaagttatatttgtaaacagtttcatttgatcattatgtacttttgatgacttgattttgctgtcattaaaaattgtcctctttttctcttgaaagtctaaccgtttgatattaagatacccaaaccaactaaataattgtctttatgtcttttccttcatctttttgtttttacattatgcatagttaatgtcaatttcttataaaaaaggtagttggcatcttactttcttgtatagtttgacaatctccatttttaaaggtagtattaaatctatttacgtttagtgtaactctggatacagtagatttgagtcctacacattgccatctgtttcctatttgactgtacgttccttgttcttttctccttctttcttgatacctcttccccttttttggggttaagtatttttaaatattccattttatgtcttctggcttatcatccattccttaagtggattgctccagagtttgcatgtatctttagctgatcacatcttaacttcaaaaaatattataacaatttgcatataacacaagaatttctattttcccacccattctttgtgccacttttttgttacatattttatttgcatatgtgctatacactacagaattaaatgttcttatttctttaagtagtcaattaatctttcaaagaaattttaaaagtgaaggaaacaaatcttttctatttattcacttatttactatttattaggttcatcactcctttatatagcttccggtttccatttgcttttatttctgatggatgagcttatatcagggtagtaaaaaacaggaattgtgctccatttgtctcttaaaccagtgatctctttatatagcacctgaaactttggaagtgtcggcttaaggaacaaatgaaactatttccaatacactctggtaagtgcattatcagaagtacatgtaatgttaagggacccacagaaaggccaatccactctgccaagtcacactcagaaaaattttacaaaaatggtaacatgggtcaaggtcaaacaggtattttccaaaaggttgaataaagcatcttcatttaagagagagaacagtgttagaaaaaggtgtgtgcagaagcgcactggtgtaagccacctgcacatatcccagcaatggcgaggagcaaagcgccctttacacgaagtatgggactggggcaaagggactgaaggggaagatctgggccagatccttaagcaccatggatgtcataggagggactctggactttatctcatcagcactgggaaagtatgtgccagagcagtggcacaggcacatgtgtaattaaaggatgacaacgggaaacaaggctgtcagcagagagaccaatggggcaactctctctacagtgacaaaggcatgcagtggattgcagagtcattgggagacatctcagaagtccaatccacagggcttggggaccacttagacttaggaataacagaaaaggagaattagaagacatcaaatctcaatcccaagagcagggaaaagaaccacggaaaccaaaagaaaagggagcaagggccacaggcttgggggcaggatccacatagcgcttcagctgaccacctacgcttccaaacctctgtgtgcagcaaaccacatagcggcatttttctcatcttcaactgtcatttagaactgcaggggtcatgacgtgaaaaccagatatcaatggggaaaaaaagacgaactcagctgatgacaacctgtgccgcttccaagaattatttatgtgggcaacggcagcaggagatgaggggatgagagagaaacacacaacaggttcatgatggagcaaatgtaatgctcagaaagggcctgaaatactctaacatccgcagccatcctggccaagcttccccaggggcaagtgctttaatgctttacacaaattcaaaacagaggcgggtcttggcaggaaaggctcttactctgaggactgaaaaggtgacagatgatgaaatgtgatgctaaaaggcccagctaaaccattaattcttgctgaaggcattctccaatggctgggaagaaaaacaagtctttcctataaactaaaaccacacttattatttaaagctgtatcattttcaagggattttatgccaacattaacatggacaacaacatgctgtctcacgctgcagcacacagggcccactggaggaggaggggctgcacgggatccccccaccgcccccttcgaggatagacaggtaagcatttaaataatacccatccagcccaccctactcagataggcaagacctagccggacacgaacaccaggacgagctcggaggtgaagagcacctgcttcccgaaggctgctggcactacggaggaatgggagccacagagggtccccagctggcaggagcttcattcacctccagcttctagattccactactccaacatcaccagaggggaaagttctggatgagaaatatcattctcccacctcagaaaagaataccctgagtatctcttgccacctctgggtttcaagtgtacaaactgtccaatttctttctccctgaaggaagattaggtctggaaagtaggcaggagagaaagcctttgtatgcgaagggcctcctgggcagaaatgacctgatgccaagatggctgggagctccacaaagtgcccatcttatggggatgccaggaatgatgcagaagagatgctggacttgtccaggagtccctaagacatgtgctatccactgagcccctgctaacaggagaggtaagccagaatgcagccaggccaggctgggcgggaaatgtgtgtgcacagtgagaaccacacgtaggaatgctgcaatcatcagcgttatgattacagcacggcgtgatatgtaaagcccattcacttacgaccacctgagaggcagttctcatgtaacacctggtttcctaaagaaaaacctacatcccagagaggctcagcaacttggccccatggcacggatctgacgggatgcatgacaaaaacacactgaggtcaggattctgaacgtagtgctgttgagactctagaacaagacggctgtgcggcaggaagacatttacctggttgctgggagggtgctgactcgggtgaaaaatacagacggctcgacttctacatgcagccccagggagagattcctgtaatatccttcagtgtggcccgggcctccagagtatttgaaattcaggacagcttccagggtctaaaagatattaaaaaaaaaaatacacacacacacattagtaactctctagtttgatccaccaggaggcaagcggcttcgcttaggaagagtctgaagataatcccaactagtcaagtcatcagcattggccgactcacaaccccggcgggtaccgactcacacccccggcggggaccgactcacacccccagcgggcaccatcttacacccccggtgggcaccatctttcctgtgatgtcccagagtctacacaattctcagcctgtacatgcaaacggaaagggcttccaaaacttactctgtggttaaatatggtttcttttttttttttttggagatggagtcttactctgtcgcccaggctggaggcagtggcacaaactcagctcactgcaaccactgcctcccaggtccaagcaattctcctgcctcagcctcccaagtagctgagattacaggtgcacaccaccacgcctggctaatttctgtattttagtagatatgggatttcaccatgttggccaggctgttcttgaactcctgacctcgggtgatccacccgcctcggcctcccaaggtgctgggatgacaggcgtgtgggatgacaggcgtgtgggatgacaggcatgtgggatgacaggcgtgtgggatgacaggcgtgagccactgcgccggcctaaacacggcattttagagagaaaaacacatttctatgagcatcatttcaacatcagatgaggtgacaggcgggggcgggggtgcttctatccagaaggtagggtcacttgggctgacagtgagtaaaagccgacaaactccacactcaggatgcttcctggaacccatccaagagaagacttcccagggcaaccaaggcattccaggagaggcagggtgctgcacagtggggagtactcatgtgctcctgctggggcccagcggtacccagtgagaggcgaagaacagaggtatggggagaccccacccatgggggtggcgctgcactcaggatggctggggaccgaaggggaacattacagcttctctgcaaccctgagtacagggcaacatcaggggaatgtggagcctgggggcacccagagtaaccacagcaacaagaagttcaaccaggttcccctccggactgaaggaccctgccttccccaggaccctccggaagcagaggacacagcagatccagcccatggaccaaatctgaccaccgcctgtttttgtgtggcctgagagctaagaacagtttttacatttgtttacagcttgtaaaacaaaacaaaacaaagcaaaaccagagaagaatacgcaacagagaccatatgcggctggcaaagcttaaaatactatgtggacctttacatcaaagatttgcagataaaacccagaggaaaacataggaacaaatcttcatgaccttggattaagcaaaggtttcatggatatgacaccaaaagcataagcaaaatgcaaaaaaaaaaaaaaagaaaagaaaaaggaaaaaaaggaaatcaaagcttctcaactgttacatagggacaataattaatatgtatctcactagattcgtgcagatttgatgaggaaatatagtgacagaacaagaagtcgctcattaaataaattcctttctcccctgcaacctacccatctgacaccctgaggcaacatggcttagaatcggaggaaatgagttttagtcccgtttcttctagttttgttttatattcttgtaatgtggcaaagtatgcataacataaaagttaccattttaacaattctaagtacacagttcagtggtgttaagcacactcattctgtctatcaaccatctccatcatccatttccgtccccagaactactccatcttcccaaactgaccctctgaacccattaaacatggactccccagtctcccttcctctcggccctggcacccaccatgctactttttgtcttcctgaatttgacactctaggcaccttgcatgagtggaatcctacagtacttgtccttttgtgactggcagatttcactcagcatcatgtcctcgagaatcaaccgtgttgaatcgtgggtcagaatttcctctttttaaagaccaatattccattacatgtatgtactgtgtcttactcatccattcgtctgtcagcgggcacttgggttgctcctaccccttggctcgtgtgaacagtgctgctatggttggacagtgccgagaccctgctttcggttctttggggtatatgcccggaagtggaatttctgaatcatacgggtattctctatgtaattttttgagaagccaccatattgtttcgcacagtggctgtgccattttacattcccaccagcagtgcacagggttcctgttttcctacatccttaccacacatttgctatgttctgtttttgtgataatggccatcctaagggacacaaaggaatatctcactgtggttttgatttgcatttccctggtgactagtcatgttgagcatctttttatgtgcttatggtccatttatgtatcttctttggagaaatttctatttgagtccttcagtctcattttaaaagctcactattccaaatcccctctcaccactcctataggtatatttcatgactacatattgacaggttcccttcaatatttgtactgccagagaaataccttcactgattctctccacctatgtaaatattactactcgacagcccaaataaagccatgccttcctcttacttacaaatggctcaataaaatacagatttttttttaatattcaaggatcatattttggcctcaccaaaatcccaaatccttttttcattccctttactcccaagcaccgccctgtcatctccaaagggctgctgatttcttgtgaacacgtctcagacctcttacattgcccttgtcataagcagaaggtgagactcgacacacacacactcaataagtctttctgtcaaaactttcagagttcaactgactttcatctgtttgatctattttttcattcatcttttcaaacacttcctgggtatcttctgagtgcagggctctgtgctcagtacaagatgaagaagatgtagtccctgatctcagaaagctctgtaaatgctgagtgaggcaatgtatgactaaattaaataataaataaatgaagccaaccaaccacctaacatatacacagcatctttctcaaaatgcaggcacagtggtcatggaaataaacaaactctcagtaatggctgtgaaaagccaaaatctgtgaagtaacaacaaatgtcacactggcttcttgtttgtttttttgaggtaaacttaaaagtcacctacagagagtgatgtaaaagaaatcacctggggaatgaacaaaaagtacacagacaactgtcaaagtaccacatcaccaagaggaaatagtctgtgtttctactttctgggaatttactattactttactctgtagaaaaccacaaaaaagatataattatgaggggaaatatctaatttaacaaaatcaagcacagaaaagttgtattactccattctcacactactataaagaactgcccgagactgggtaatttataaagaaaagaggtttaattgactcacagttccacacagctgggtaggcctcaggaaatgtagaatcatggcagaaggggaagaagcatatcttacatggcggcaggagaaagtgagtgagtgtgtgtgtgaaggaggaacagtcaaacacttataaaaccatcagatctcatgagaactcactatcatgagaacagcatgggggacaccacccccatgatccaatcacctcccaccatgtccctccctcgacacgtggggattatggggattacaattcaagatgagatttgggtggggacacagagtctaaccacatcaaaaggttttctgaagttcagtgtcactgccttacctctttgagataaaaacaaaaaccagaaataacaaaaaaaggcctcctcagtcttttaaaattagaatattatatataaggtcttatatattatatatatggtcttattaataataagaacataaggggagctgggaagtggaaagacacaggatgtccaagcccttttcctcaatccaagagacttcataagatgttcccatctgagagcatttttcaatccttactttgacagaagactattacagaaatcataaacgagggactacaaccaaaatgtttattttctaggcacacaacttattattccagctaacatgaaaggcctgtcagtaggtaccttttattaaagagtacctactccatgccaagtgctgcactgagtgacttacacacccaactgcaacagtcatgagagccccacaagggaagtgctgctttcatcaatgaggctcagagcacccaggaagcagcacaggcaggaactgaatgcagagcaacatgcctgcacagcccactctcttgccattcaggcaaactgtttagaatagcattcattcacccatgcaatcattcactcactaaccctgtctactatgtcccagggactgtggcacttgagaggaagaaggcacagtgccacccttggggcactcgagtctggtaaaagaaacaagccttgatgcctctgagtaaattgtgacacgttgtgtcatggataagtgtattagaatatatgagaatacaggaggagaaaggactacatatgccaggtgggtaggagttgcagaggaaggaacaacaaaccagtaaggaagacaggattagacaattatcaattgaaaatggataaataatggaaaaaaacaactatactaaaacctacttcttgaaaatatcaataaatgtgacaatcctctaagttgatcaaggaaaaagagaagagaaaaacaaattgccaacatcaggaatgagaatgattatcggtacagatcctacaaccattaaaaggacaatcagggaagagtatcaataattttgtgtcaatagattcaacaacttagataaaatggtcacacattaccaaaaggaatcaaggagaaacagaaaatctgaagagcctcatgccaattgaagacaaatcaagaatatactcccaaaagatggccaggcattgcggctcatgcctgtagtcccagcagtttgggaggctgcgcagaggcagatcacttgagccccagactttcagatagcctggccaacatggcgaaagcccaactctactaaaagtacacaaattagctgagcttagtggcgcaggcctgtaatcacagctactcaggaggctgaggcatgagaatcatttgaacccgggaggtggaggttgcagtgagccaagatcatgccactttcctccagcctgggcgacagagcaagactctgtctctgaaaacaaacaaacaaacaaacaaacaagcaaataagaatgtactcccacattttcttaatccagtctatcgttgttggacatacattgtgcacatgtaccctaaaactttaagtataataataataaaattaaaaatatatatatatatactcccaaaagaaaccccaagcttagatggtctctcagctgaattctaacaaacatgtaaattagaaagaatatcaattttatataataaacatttttagcaattagaaaaaaggagaaaactttcccaatctttttatgagaccaatattactcaaatatcaaaatcagatagaaaacttctaagaaaactattcatgaggcctatatccctcatgaatttaaatgtaaaaaatatttttaaagtactaatgaatcaagttcagtaaaatataaaatgggtaatacatcacggccatcaataatgcaaggctggtttaatcttcaaaaatcaaagtcattcaccatattaataagctattgacaggcaacaaaaagaaaagctgaatgatcaatagcttcagaaataatagttgacgaaattcaaaacccatttatagttttttaaaaactctcagcaaactaggcatagaaaggaacatcctcattctatgaaatgcactcatgaaaaacctatagtcaaaaccatacttgatgataagcaatggaatgttttgcatctaaaatccagattaagatgtagctgtaataatttttgtaagcattgtacttgagatcctagcaagttcaataagtccagaaacaaagggcatacatgttggaaaggaagaggtaaaactatctttgtttgcagacaacataatcatgtaccaaaaacatcctaagaaatctactggaactctcagaaattgctggtggcactataaaatagtaaaatccttttgaaaaatagctaggtaaatcctcctacgcttaaacctacaattaacatattactcagcaaagcaactcctaccaagaaaaataaaaacacatatctacacaaaaacatggatgtaaatgtccacggagactttattcataataataccaaactggaaacaacctccatgtccaacaagaggtaggtgaccaaataaacaaattgtagtaaattcacaaaacgaaatactactcagctaaagaatggagcaaattactgatacatacacaacatggaagaatccaaaaccccttattctgaaagaaagaagccagacacacaagagtgcataccattgcttgtatgtatatgagatactagaaaagctcagcctttggtagcaaggagatcggcagttgcctggagttagaggcaggagagggttagctgcaaaggggtcagagaaactatggagggtgataaaaatattctatatctttatggtggtggtggtggttacatggagtatatatttgtcacaattcatcaaactgtatggttaatgaggctacattttatagaatgcaaattacactcagtaaagttgatttttgaaattgatcctgaccattaatagacatacaatcactcgtaaacattattaaagaatctaagtcacaatgtgggccacgttgatgtgggaccagccatgtctaagagcgaatgtgaggccctcgaagaggcttcagatggagacttaagaatcccgggttctgcatcagaagaaacagcagtgaggttatgattcaccataattaaagcttcatgtgacctgggagaagtcacatcacttgtccagttctcagtctcctcaccttaaaacctgagggtcatgccagatgttgcctgaggttttgaccagctcttatatgaacagttattctttattttcctaacgttccacaacttctaatataactaacactattgtcagagaaaaacaatcaccctcatatgtatgctagccaacttaaatgtatatgaagtagatctctaatatttaaagacctcaattgaacctgtcaccacggatttccttctgctctgtttctataatatgacataaaattaatagctgtgatgtgatccacttaataagtcaaacattcaagaccaaaggctggggctcattccccaagagaccagcacaacggtttacttaaggtcaatgaaactcacaaataaaagccataccattactttccagttaattagcactttcaaccaaagtttttcttcagtgttaatgatgccttcaagatgccaagtaactacaaattaagtgatccatccacagcagtgcagggatgggtttgaacaacagcagccatcaaaacagcttccagccaagaggcccaggagtcccgtggtggctgagaagagttaggacacaaggtccaaaggagggggtatgtctggggactgttagaagaccaagttgaaagtctggtttaggatactaaggagagcatcaagtcagagagtcgaggccagacagaacctgggacccccaacctaactccctgggcgatgagcccagtgccatagaccacagcagtgcagagggccgccacgtcctacctgcacttacgctccagccaaatttcaccttctctgagaagtctttccagcgtctccaaagaaactctgccactctctaacacataccacatggacactctgctccagcacccatcacacctggagttacatactttgtcgataagaagtgtattcagtcatttaaaatgtaagtgatataaaatggtcggtgctgagatggcttgctcccacctctgtcaccacgtccagaccactgtcctctcccatcccctgtaaccaccttattagttttccttaatgtatccacatttatttacatacatttatttacacagaaacaagaaaatacaaatgtaaacttttcctccccccccaccctcctccagccagcaccaccttgcaataaatacataaattacacatgctgtccacctttgtatgccttattgtttgttaactttcacttaatagatcctgaaaatttttacttagtacagacagagcatcctttatagaatatcctttgcaggttatttgtagacatgtgtgccattccatggtacagatatgctacagcttacttaaacagtaccctaaaaattggattcatagttgttttcaatattttgttattatgaacaatgttataataaataaccacatacataagttgctttccatacatgaagatatttctgaaagatatatttttcaagggagatttctgggtcaaaaaacaaatcttgtcattttaatggatactacccaaatgttcaactgaaagtcgaaccatgtcacatgttaacagccatgcttgagagagcacttcttttctcaaagccttgaaaacagggtatattgttcaacttttggctttttgacagtctgacaggtgaagaatctcaatgtagtttcattttacatttctctcattattaaaaaagtggaacatctttccatatgcttggcacattttcatgcctttttcatgaattacacattcatatcatttccctatttttttaattgacctgtatttttgtccaaattcctgggaggttttctacactaaggagattaccccttgtacgaaatcatgtctgcagacagagacagttttgcttcttcatttccaaaatctatgtcttttacattttctttcttggactactgcactggccaggactagtaaatgaatggatgagaataaagattccaaaaataaacccacactgacacaggtaattgatttgttaccaaaagctaatgcaattcaatgataaaatttaccttttctacaaacgatggtggaacaactggacaaatgtgtagaaacaaatctcggcattgaccatacattattttgaggtgggtcatacatctaaacatataacacctagaacgtctggaagaagacatggaatatctttgtagtcttgggataggaaaagagatctcggagaagccacaaaaagcactaaacatcaaaggaaaaaaaaaattcatttcctttaagataaaatttcatccagggaaatctccaaaaagttagaatacaaaatttgtccatttcatccaagttgtcaaatgcattgaaatgcaactcttcataatgtggtttttttttttttttttttttttttttttttttttttttttgagacagagtctcgctctgtcgcccaggctggagtgcaggggcgtgatctcagctcactgcaacctccacctccctggttcaagtgattctcctgcctcagcctcttgagtagctgggattacagaggtgtgccaccataccttgttaatttttgtgtttctagtagagacagggtttcaccacgttggtcaggctggtcttgaactcccgacctcaagtgatccacctgcctcggcttcccaaagtgctgggattacaggcatgagccactgtgcccagcccattatgttctcttattaaccttttcacatctgtaagatctatagtatgttcctctttcattccagatggtaatagtgtttctctttttgatacacctgctagggaatcatcaactttactaatattttgcaagaattaatttttggctttgttaattttctcaagtgtgtgtttgtacccaacacaagacttggcacaaagcaactattcaataaatgcttgctaagtagaattacatttgaagatgatttatacattaaccatgtatcaatgtccattaaacagatggatggataatcttattaataaacactttttccatacttcataacctggctttacaaagatttccctcacctctccaccctaccctcttcccactgacaaattcttccttggttattgggtttctgtggacaactcacatcacctagggagtctctgtgatcctgcaaagcccaggctggctgcacctcctcaataaacagcacggagcacgttccctgcctctgacttaccacgctgcagcacaagtgcttggatccttcaacagaataaaagctcactgcgggcagggaccatgctccatacctagtgccttgaagagcaggtgccccacatgcattccgtttaactgaatgacagcatcttcacaacaaatctcagagaaaggagaaagctgacattcagtaggctcatactgtgctccaggcactgtgagcagcacttcagaaactttaagtcctaccacaatgcagcacaggtatcactacctcaacagctcaccactatcgaaagcttagggaaataaatagccttgccacaaagctcaaagccaggtctgagtccgaaggtcctgctcttccggcagccctatgctgtctcccagagaaaggctaaggagacaaagaaggagactgtgagcagaaagctggcgctgccctgaagaagcaggcctgggttcccgaaggaaggccagtttcacagctgccgcgccatgaggctgccctggccttggtgctaaatgctgcattcaagatgctcacggtttttccccttctgtatacacagctggaggagggtaaactgtggaagggatgattttaataaatgtagtaaaactgaaatacaatcagcctgaaattaggcagcagagatttgttaggatcagcagaattgtccttacattaattcactgttataagccataagcaattaggacattttccattggcactcatttagttatgagaaacactctctggccataggatgtggccttttaaatactgctgatcttcaatattagagaaatgtacttgacagccagcacttcatcagacttccggcttatagaaaggaatgctatatccttccaaagttgtatgactgaaatcaactcaagaggagacactaaggtgttacgcatgcaggaaattgatggggacccccagcaaagatgccaaactaagtacctgcagagggctagaaactgctagcaggtcagcaagaagcaatcctcacaaccagtgtgtgttaggtggccggcccctgccagacacaatgctgggagctgcgcacactgggtctctctcaggacttccccatcctatccgacaggaaggccttgaatagcaactgtcgttcggcaaggtgaggtacgttgctccagttcccgtagctagtaaaccacagagctcaggtgcatctgaccccaaaagccacaatcgccaggccctaaccacactgaaggccactgataaaggacagggcactgtgacttcaccgggaatcggcctgaagaagcgtctttcgatgccttgctccacgtgagcccacagccaacaccaggcaaggcggtaaactgagaacccctgcaggagaaacctggcgtctggccacagctcccccatcaagcctaggtgtagactcaagaaagtcacttgtcctttcttggcatcagctttcccatctgtgaaatatggatttggaccaattaatctccagtggccctttccacctgactgggctacacaggggaattgaatgcccaactcacccgtcactggacaaacactggctacgagggtccatgtggcggggctacagagagagcagaggcagccgcagccagaccacacaggcacaccaggctcagaggggacccacgcctgtgctcccaacgggctgggaagccttcgaagactttttagctaaaggcatgacctgaacgacttctttaaaaaaaaaaaaaagaacactctggctgcaacatggaagacagactggggacaaggctaaagaggaggtgccaagctagcagatgaagtcactgccaggtgaagactgatggggacgtgttcggggggtggcatggagtgaacattgacggtcaggctccgcacacgtgctgccattgaagacatcagagctgaccgacggtacgctgagtgggaagggaaaagggaagccacggatctcttcaagattagattcttgaccgaaaaaaaatgagaagaatgcactaccagtttactcaagttggggagagaggcagaggagcaagaagacagggtgtggtacaaagatccatgactctgatttaggacacaggaagtttgagattccgaaggacatccaagtgatgacagtgtgacacacgagtcctgagtggggagaagtcgggctgaagagacgtggctcacagggagacgctgcagaactcagagcagggagcccatctgtccagagagagagcaggagccagcggagcgaccctcacctgatgcctggggttccttggaagctaagatgccgcgtgtgtgtttacggaaaatcatcacgatcacattattgttattttttttatttttttaaattgtactttaagttctggggcacatgtgcagaacgtgcagttttgttacataggtatacacatgccatggtagtttgctgcacccattaacctgtcacctacgttaggtatttctcctaaagctatccctcccctagccccccacccccgacaggccctggtgtgtgaccgtcacattattttatcatacagtctttcagccctcttgctaataaacacttgtcatgtgatgtatttcaaatttttacaaaatgcatcttaagcagcaaagaataaaatagttaatagcacccactgtgaaagcaggctgcccgggctcagaccccatcgtcatttcctgcccaggcccctgagcgagtgatctgatctcttcaggcagcagctttcacatctgggttatcaggaagacaaaaccagctagtcttacaaaacaccgagaacagtgcctggcgtttggaaagagtgctgtaagtaccagctaatattattattactaaatcagtattcaacagtgagaaaggaagataagatacttggaacaaatgaattcataagtagagccaagaataaagaaacaaatttccacatctgttcttcagataaaccatcactggccccaattgcccagctacagttcagacctcagcatagccgctcccagcccttccacatcggacccctactgctcctcctgtctcaggtcaaacacataccacacacacacatacacacacacacacaaatgccacacacatatacagacacatacacacacacaaaacacacaccatacacatatacacacatacccaatacacacacacacatcccacacacgtacacagacacacatacaccacacacccaatacacaccccacacacacacaccccacacacacacccaaaacacacacagacatgcacaccacacgcacacccaacacacacacagatacacacatacccaacacacaccaacacacacacagatacacacatacccaacacacacctccaacacacacacacacacacacacacacacacaccccagagcttccctcgtgctgcatggtaggaaagttgctgaaagctgtattgtttcacacctgtgtgcctgaaatgaatgtccttacccactctctccaactaggacattcctagtccttattccagaagactaagaaactctctctggtactccctgccctcagtttagacacaacctctctggcctctgtgtcatcagacatctcctccatgtctccatcccaccaaagtgtattttcatcatgtgaggaacggagaataaaaaggatggcacaggactgctgtgagaattgaatgagaagctgattcgccgcagtgcctggcccagggcaaggattccacaggtgctggttcctgcatccccttgttcacctctgctcacccgtgctccacgggcagggccacacgggcctccagcacctgcaacgtggcctgacacccctgaggctgcatccaaagctggccttcaagtcaggacgatgagaaggaccaggcccctcactctagagggtggaaatgacagtattgtggggaacaaataggctatgtcctgtgcatcacaggtcaccaacagcacatctggaaaatacctgcagcgaacaacgcattgacacaaggtgtgtgtggatggatgagtggccctggctccacgcacactgctgtctagatggcgatcaagtggcgagacggaagcagagcacacagtaactgatccagagggaggcggcctctcctgatgcaacaacacccagtgtcaggcatgacggcggccagggtaaggtcaaagcaaaaaccccacgaagggagagaggcagctgagcacagaggtctcgacaggaaaccagatgtgccaatatctgccaagtctgtctaatccacgtgcttagatggttcccgtctgcagggcgcaatcagaggccctcctcggagcctccataggatgcaagccacagcctcagatggctctgtatctctgctagactgtgtccccagagacagaacacccagcatttcatcctcacaccctcgtacctggaactcacagggagctcagcacagagctggggaaggagcggagcgagaaggggcacaaacctgcagggtcaaagcctcaggtcaatgtgcagtgatctacaagatcccatccggtgttaaatctgtggtaaccagtccatctttgatatcattagccctacgctactgtaccttcattgcagtgctaatagcattctagcctcagagtctggaagcaccatcaaatccacttttactgtccacggcctgtctgataggcatggggccacgtgccctattaaccaggactataaacgtgaagttcatttactcaaatggtagagatgcaattatggcttcacccaagagagctacaagaataagaaaggcttgattcacagaggacactttcttgttaatgagattggagttaggagccaggtttacgtttgggagctgtaaatataccagataaacagtgggaggattttccagtatactcagcgcctccctggattgtgtgattttaaaaaacatataattattacccactttttataggtaagaaaacttaaacactgaatgatttaatgtgcacaacaaataaatagtttaaatgccagctgtatttaaattcaaaacctgtgttctagtcattaagccatggagtacacttgactttttcttcttcgatttttacttcagtgttttgataaaaaacttgatgtatgaatgtctgtggaaggtgcagctggaagctctccagcccactctgctcactaggtagctgccttcctgctatggtgctagcgatatccctaagaactgatggtgccggtcagagtatgtggcttgggctgtatgaggcacctaatcaccagggctactttcaaccctggacaacttgtcagtggccagtcatgatctctccattgcccttttcattgatctcttcactgaacaattacatggtgagcatgttctagtatgagtccacaactctaaagggatgaccagggctgcacacaggaggtttgtgatcaagggaaaacccatatccctctcccaggagcaagaccccatcaagatcaaatggagcaattctaatactgactatgtggaggagtctacaactcccttaagaaatttgagactctcctgaagggaaccactgctgatagacacatgtatatcatgagaagcgtgaaaactccctcgagactgtcagcagtgcccagcccaccaccaactacttaccacccaagccccccagccaagactatccacaacaatcatggcctagtggaggtactcatgaccacagcgcacaccaacactacgtcccaggagcctgcccctctaacaaagtgaagtgtgatggccttgctcacaacataatccaacatccatggacactgccaaggtcagtggtcaagtggcaaggtcatctctgagcttaataggagcacgctcagtgctcctattttagacggagtctcactcagtcgcccaggctggagtgcagtggcgcgatctcggctcactgcaagctccacctcccaggttcacgccattctcctggctcagcctcccgagtagctgggactacaggcacccgctaatttttttgtattttcagtacagacagggtttcactgtgttagccaggatggtcttgatctcctgacctcgtgatccgcccatctcggcctcccaaagtgctgggattacaggcgtaagccaccacgctcggccgcacactggcaagctttctatgtcaccatcccaacacacatcattcagggatatgacctagtgtctagaggaagccaattatcatgacctcaagaaggtggtgatgcagtaactaaaggactccttggaaggtgtcctgagccacggggaggcccaagtcaactgcaatcaagatgtccatgaaaagggggaaacagtcaagagatgaccatggaaaggtggaaacgttcaacagaggtgtccacagaaaggtggaaacattcaacagaggtgtccacggaaaggtggaaacatttgatgctggcgctggcatttaccttcgacaactactttgtcaaggtaatatccaggtatgaatggtggacctcatggtccctgtgacctccaagaatgaccaggcccaacatctcttgcaatagcagaagagaaaaacaagccctcagctactagagctccctgacccagccctacccgcaagacactctgaatctcctctctctgacagtttccatccctggacccatgaagaagggagattaggagaatcatgtataatcaataccatcaacatactgtacctggcagggaaaaaatatacacatatatagtaaagtgtccaaatgattagagccctgtgaaacaatgagctatcagtacaggtgttcaaacagcgtacacctgcacagcaaggtaaactaagagactttgcaagtactccctcccaacatcaaagattaaatgattttttccacagaaagtgagaattaaacagaggctaagaatcaagtcagtaactttgtttttcaactgggaagcccaaggtccaacagccaacagaccatggccctgaactcaaggccaaggcctgtgttccaccctagccctgcccatcacccaaccccttctgcaggggatggggagaacgctcgtgacttgctcgccctcatggcggtcacaccatcctgggcctcaacatggcatctaagtctaatctaattccagcttctgggccaagcgcagtggctcatgcctgtaatcccagcattttgggaggccaaggcgggcagatcacttgaggtcaggagttcaagaccagcctggccaacatggtaaaacctcatctctactaaaaatacaaaaattagctgggtgtggtggcgtgtacctataatcccagctattcaggaggctgaggcaggagaattgcttgaacccaggggtggaggttgcagtgagctgagatcgcaccactgtactccagcctgggcaacagagcaagattgtctcaaaaaaaaaaaaatctattatagcttcttatcaatgaaagaagcacaacaaatcaatattcaggacaattgggacagtttgaatatggaacgtttatgacataacactattgtactaatgtcgaaggtcatgggtgtgacaatggttatttaggaaagtatccttcttaggaggcatgcaaaaattatttaaggagagaaataatataaagtctgcaacttagcccaaaaaagtgtatgtgtgtgtgtgtgtgtgtgtgtgtgtgtacaaacatatacagagagagaaagtagagaaaaaagaaaatgggtatagatgatcagtatacaattttttcaacttcatgttcgagatatttcaaaataaaacgttggggaaaatactaacaaatcaagtcttccagagtctttgactttaaaacaatcattcaaaatgtgtaaaggaggcagccaccttgcggaacacacgcatgctccaaggatggttccggctgctttttatagaagagtcctgatcttcctgagaaagaccaaggcatggatattagttccccactttttcagctgagataactgggacttggccaaggtcccagagtttaccccaggacacctggtctttagggagcctagctgacctccttcacctacgcttgctctccacggccctgtggagtgtccgggaccgcctgggcccacgccctctgcagatgccagagcaaagcaaaggtggcagagcccccacctaacacatctctgccttcccagcaccgggctgctcctgagtcaatttccttctgctgatcttcgcagttattcaacgactcttctagtctgtggcctttgcttctttctcatgccagcaaacctccttatttacacagaaaacagaaacattctgtctgctgagccagcagttgtgcctccgggctccttcgctctgggcagccctaggtgaacggctcccatctgagggactcagtccctttgtcttcacacgggagccaatgtaataacttccctaccaaactgtttttcagctcgactggcagaacaagagtcagggcccaccggtcctgtctcttccatggacatcagctgtcccccactctccctgcctgatgaaagttaaggagctaggacttggtgaggaacgctgctctaaaccctctgttggcttctatgtgcagtaagaaaggctgaatccagcatctagaatttcttcttccagtctataagctcttccactttttatagtttccagaatatcttacataggccaattggaaaagagggtaaagaaaggaagctacctcttaacaaacatctcttgtacactaaattcagttttgtttaatcatcttgtggctaaagcctcaaagccatcctacagaaaaaaagcccattattcccattctccaggtgaggaaaatgaggcttaaagagcatgaagtaacatgtcccagacctcaccttcagtgataaaccttgttctccattcttcctgcttccatgggaagggtttccccagcatagtcccttcaccctggctaccccgaaccccagccgaccatcctgaggcctgatgggtcagtgtcataactcttgagatccattcacagcacatctgaaggagcagctctgccctccagcctacagcagggtcaccaggggagcttgcttgaacacctagatcgctgggccaacaccagtgtttctgatttacaggttagagaggggcccaagaatgtgcatttctaagaagagcccagcttcctgaagctgctggtccagggaccacactttcagaaccactgcaatggaaatggggcgatacaggcaagttccctaattagtgagatggggaaagcatggtgacgtgggccccagtccttccctctcccctccagtggccctcccagcctgccccatgggtgtggcctgcccatgactgcctgggtacaaggaattctaccatgaggcctgcctacagccaggtcagactccagccacagcctgcaggtaagcagaccgccccattcctgccgtacctggcagttgttctaaactcagatcattgtgccagcagggtgtcagccaggcgccttcaaaccttggtagtcgccctgaagacgtgccaaggtagacggtcaagccaaggctgaccccagtgccatcccctctttcttctgcttcacagcagtccaacaaaaagccacacccctcaactactggacaaacattcactgggtgcccccctgttccagacactgtgctggtccagaagcaacagaacaacaacgaccaaaaaaaaaaaaaaagaaaaatcacagtgggctaggatatgacatcctacttaggcactcaatcccaagatatcaatcacctctggccactgttcccctacaaccactcatgggccggtaaagaaaccgtggcttggatgtgcaacttgcccaacaaatcccacagcttcagtggcagaatttggttccatacgtgcccaactttgaagaccatgctaacagacagccatgacaccactgtaaaaattggcattataacctgtttatcaggccccacccatgagcatttcttcagggcatgacagtgcccccagggcacagcacagagcctggcaagctgcccagtggaggaggtgggtaaatgctacggacggaatacataaatgacgaaagcaacaccttcggcactgatacgcagggctttcagaagattacagcttctcgcctcggggagaataagtccctattataaatggaaaccttatagtcccgcagatgctctttatttttcctaatgcacagctgcaaaagagaaaattttcccttgtgtgctaaatacgcatttctaattaccctcacctaagatgcattcactctaaagactaagaatagctaactgatataacttacacgcagtaatatagtctacgtcagctggaaaaattaagccaaaggtaaactaggattggtgaagagtcaataagttattacaaggaatcgccaagattgaaaacaaaataagatgcagaatgaaggcatagaactttacctccaaaaccagagccaagtcaccaccaaggcatttgacttcctgagtccttgcctctggttaccccatctccagcagagatggagaggaaaaggagaaggaggtgaggagtctgaaggcccaaggtcagacaccagtccagtattgctattccaccggctctgagacctgggcaaacaacctgaccctctgcgcttcagcttccttgcgtacacgaagcgaggatggtggcacatctgcctgctgcgggctgtgagcattaaatgagcacaaggaccttgggtttaacaaacccaagtccggccaggtgcggtggctcatgcctgtaatcccagcactttgggagaccgaggcgggtggatcacctgaggtcaggagttagagaccatcctggccaacatggtgtaaaccccaactctattaaaaacacaaaaattagctgggtgtggcggcacgcacctgtagtcccagctactcgggaaggtgaggcaggagaatcacttgaatctgggaggcggaggttgtagcgacctgagatcgcgccactgcactccagcctgggagacagagcaagactccatctcggcagaaaaaaaaaaaaaaaaaaaaaaaaaaaaccaagtcaggtcctttgcttctgcttggagaacactatacatcctaaggaagatgacggtggctgctcaggtcttctggggagatgaaacccacagtgtccaaggaggacacgcccagctcagcctcgaggtggcagagtcccagatcaattacattcccttattcatcctttcaccaaatggtggttctgagtcaataccattttatgtaactaagaaaaacgaaaagcagttatcaccaagactacagtttgaagttagttaatattctagcagcactggctttccataaatcagctgtcctctcaaaagaatggtgggattttaaccagaagaaaaaggaatctggagactctttttttaatgtgggactggatctagatgggaggatgggactcctgtgacacagcaagccacccttctccctgaggaacacctggataagagctgaggggtcttgcccaaggagactggcgtcccccgccttgcactagcactgtgctgagcggtcttgccgctctccggtggtgcttggcacggtccacggtgcaatagagctcttcccaggaagttggatgctccgtgtgttgtcccaggtcttcgccgacggctatgaaaccttttctctcctctgtgagacagggcaacaatgccttcttggcaaggaaaggcaaggagcccagtgtggctacagctcaggctttatagcaggaaagagagctggatggacagggcgggcaggccaaggggccttcgccccagactccccacagccgccgactccctccctttccttgcgccttcctccctgtctccagcagcttctgtcacgctggctagaaggtaggaggttccaaaaggagcccctgctgtccacagcctgggaagacttctgcaatgtttctcctccagaaaatggttcccagagcattcttggatgcctatcttacaggctttgtgctttggtggacatgagccctgctacatccaagaaagtgcagtcatcttgcactttctaaataatacagcatgaagaaaaggacccagaatttattcttcaatgccccataccccttttctaaattagaattgccccatattttataattgccctaaattataaatgttagtaattggcccttcatcctaagatgtaaactaagatctgggttcatatcttagctccacaagcaaccaacctgggcacattatttcactctctggaactcaacttttcttcatctgtaaaatgggacagatattccttattctgtaggcctgttctgagaaatagaaacgtgtacagaaaaagcctagaaaggttcccgtggcacctacaataaactgctcttgttcctttctgtggaagctcttctgtgaccagctgtctgtgaggtgtcctggaagggaggcctgcagctccccagagattctagcccaaccctgcctgggccccgccagcctctcccggcacagcctcacagcaggcatgttggaggagctaaatatagctcctcagactccagggcggatggtcacccgcccgggctgtgcctccttccacatcacacacgcgcacgcacaaaacacatgctcctcggcggaggcccctttcagaaacacgcatgcagaagctcagtcaatccacctgcagtgcacgggggacagctcgcatttcggtatgctaagaatagtccgggttgcgctaagagcccgaatgcgaagggtatggaagtcgttctctgcggaggccccgctggcaccggagagccaggcatggcagcccacagggtgaaaggcgggtccccaggggccagaggagaggctgagagaatggagaagaaaacgagtgactgcctcgggatatagggaagaaaacacatcgcgcatgaagaaggggacaagagtgggctggctgggcccagcggccgctgctcagctctgcctgcttctctgcaggctgtgtgagagcagacacagccacagcctctgctgaaggacaacatggagaacaacagcaacaacaacacccagttggtgctgaggggctgggtgccagcccccgagttccggtgtgctggagcattctttacagcagacatgggacatgagcccgggctggctggctctaccaccacccttagcagaaagccagatcagactccaaccagactccagtgcacacaccactttccatgacccagcagaggtcggggcagaagtggagggcgaggtcaggagacaaagggccaccaggggccaggccacaagctgccagcaaggcagggtccagccatagccacaggccccagccagagctcaaacaaggacgcatgtgcagcactggctgggccagctgcatcttcacaaatggcccagcagaagctgggctggccagaagcccctctgataggcagactctctaaagtcccctcctggaaatgccatctttggagatggacacaattggcttgtccatgccagctctgcactaacagctgtgggtccctgagcatgcctatctccttgtctagaagatgaggcagccaaccactgtggcttcacaaggctgttgtaaggacagtgcctggcatatgcaacgtgtccaatcaattgtcataaacaggataatgacaatgatgacaatgactccaccttgtacagggtaacactcagatggcataaagacaatcttactggaagctctggaagaaacaaatactaactctttaagggcccacctcttgggaggaagagtaggaaagtcggggtgagggcaacatttctggacaatagccctatgccaggtgccaggccaggatcatgagagcgagtttaggctcatgtaatccttgcagccatccatgaagtggagaccaagagctccatggaacagacaagcagagcaaggctcagaaaggccaggagctatagcttgggtgcggagggacagggttttcatctaactgaagccccaaacacaaattctaactctcaagtctcaatgctcttcccagagtgggagactgaggtttagggagctgaagtgactcacccaaagtcacaaagctagtggaggtgcggggtccagcgtgaagggagggcacccgtgagcccaggaccccctctcccgcatgaatagcaggcccagggctgctcttacttgcttcctgtcacccatcccctgctcccctactcccagctccaaccagttcgtcagtaccacccctctagtcgaaggcaggaatcaggtgtcattaatctttataccctcggtgcccggaacacagcagaaattccagaaatgtttaccaaaaggaaacacgagaagctgaggcggaaggaaggcgggcctgcaggggtggttacagaccaaacccaaggcacacagcacaccagaggcccacagcaacatctgattccccgcgatgacggaactggccccatccctttcatctcatagctaggggactctcttgctatatagatatggaaacagaaactcatacaggtaaagtaaacccccacgttcgcaggacctactgagggcagggccagaacaaaagcccatgctggggcctgcgggcccagagttggtcctatggcatgaggctcctaaaacttttggcaaggagagtcatgccatctgacttaaaaatataaatgctcccttccgggccgaagtggaaaatcaataagctgcaacccaggcttactctttgccagaggaaggggagagctccaaggttcctgctattgtacccgggctcctgttccttcactagggacctgcggaaggcacactgtggacactgcgggaagagccggccctcggtgatgtgttctgcccacctctcatcaagcatgaagataaatcctacagggctcccccccccgagaccaccaaattatttccctggcaaccagggaagtgaatagaaggttatgtatccctcccatttgctcgtcggtctttgaaactcatatacagctgaaaggggaaggtcacagggaccccctgtccaaacaccaaaccctgggatttccttgaggctggaaatgaaagcggatctctgagcagccttcctgagcgtctgtatcccacagggcaggcactgtgtgaggttttgtggaaggtctcccgccgagtcctcaagatcattctgtgaggtgcgagctttattcctcattgtagggatcagaaaacttgtccaagatcaagtgggaaaggctccttcaattccaccacaactcagtccccaaactggatggccattgagcagatagtgtgtaactgttgcctacacgccaaatgacacatgcaggtgtgagcggtgactgtcaggcaggccactggggtgtgtaacaccaggggcatgagtacagcgtgggggcaacagggctaagccactgagtgtacaagggacacctggggacccatgttgatagtggggccaccagatctgaggtcagccatgagctagcgagaggattcggcaatggaggcctttggttttcacactgggcagctcaggcgtaaagcctccagtgcttcatgagtcatcaaagccaatgaagaagtccttggcagaggattcatttgaacttccctttaacacttcagctgtggggagtctggcatgaaatatgcgcattagctactctccaactggagaatgcagaattaacgtctgtggaaaacctacatgctgagcgatgtgcacacaccatctcatgcggttctcacaacaatttcccactttgcaaatcaggggactgaagctcagagaagtatcatgttgtgcctctaccaggtgagatgcccaaccccaactcccaccccaggtcctccctcagtgcccccaccccataaacagaattccctctgacactgcatgcaccagcctccatgactctctgggtctcatggtcccctgacggaggcacacgggactcaggacacccttcctcatccccagcacctccacccggggcacaggaaatgctcatgaaatgtctatggaggaagagagatgggagatggagagatgggggctggggagggaagaaggggggaagtaatgagtcaccagcctggggtcccacctggaaacaccagatgggaacaacccaccgacaaccccaggagggaaacaatggcatccagcttccagggcacacacactggggggccacacagccctgcacagggggaagggcacctgcacgtggccttctttctcagctgggcatcttggcactctcaggttcttctggacattgtcttccacgctgaaggaacggaagtcaccgaaacagtccttgatggctattttagaccttcaactgccattaagacacaatctcgtacagagagggtttgtggccattccgtacaaggaattaacaagtatgatgagctcccactacagatagcatccttaaaggaatgagtcatcagagaccaccagatgttagcaagagagaagtgccttcattcctgcacactcctccctccctcatgcccattagaagacctgaaggggcggtggagcctttaaaatcagggccacagggccaatgagacctcctccatgagcaccatgacctcagtgagcactgtgggacctgccaggatggacagagcagctccacactgggatctgaaccccgggggttcctgtaagccctgcaccgttggtcggtcatttttcacatgggtgtatctgaaccctcaaccctggattcagaagccttaatcgccacaggtttctcaattgcttgcagcaagcatctgaggggtccctctccctttcctgacacagaagatgaggaggcaagggtgctgcatacacctgcaagaaacaggcttcctcctcccaccccatggcacccacacaggaaaacattgttcattctttttttttttttttttttttttgcctttgagaacataaagcaaatagcaaatacaaagcacattcttaggaaatggaaaaatttgttctctagagatttatagtaaatggtctataaaggacattgataattatttaaggatgcatcgtaaggacggctgctcccccacgtaggacaaagggagtatttgtagtcctggatccctgtgggtaagaatatgtggagaggactaatgagaagagcagacatctagactcattagtagtgattcagtagttttcactctcctgtaagatcacagcaggagtttaactgtgtttccaatccaaatgcatccactgtatttctttccattgtatgcagggtaatagacccatgaaagggaagaggaagactgcagagaagaaaacgttctcccccacttgcagcttctctccagcaccagtagttaagaaagatggagcatcaggggccggccaggtgaccaccagaggaggaaggcagagcaggcaaagcacaaggcatggcaaagaggggtgcggccttctgcattccagggtttataatgctaattcaaaattaccacagcaaataaagaacatccagaggtatctcatcacacggtattctccaaaacaacaacaacaacaacaacaacaacaacaacaacacagaaactgcagtcctttctcttaattggatgtaaatgcaaggaaaccttctctttaaaagtaagtctggaataatttcagccacaaaataaataatgatagtaatggccgggcatgagggctcatgcctataatcccagcactttgagaggctgaggtgggaggatcacatgagtccaagaatttgagaccagcctgggcaatatggcaagaacccatctctacaaaaaattatttaaaaacttagtcagggctgggtgtggtggctcatgcctgtaatcccagcactttgggaggccaaggtgggcagatcacttgaggtcaggagtttgagaccagcctggccaacatggtgaaaccctgtctctagtagaaatataaaaattagccgggtgtggtggcacacatctgtaatcccagctactcaggaggctgaggcaggagaattgcttgaacccgggaagcagaggttgcagtgagcaaagatcgcaccactgcactccagcctgagtgacacagcaagactccgtctcaaaaaaaaaaaaaaatttagtcaggcatggtggcatacacctgtggtcccagctaccggagaggctgggataggagaatctcttgagctctggaggtcaagactgcagtgagccgtggttgaaccactgcactccagcctgagtgacaaagtgagaccctgtctcaaaataaataaaaaatgataggagtggattcaaatccattaaataaaacaaatacccatgacccccaactgacactactaagtaaaggggaggaaaaagagacatctctttcctacagaattcccacaaatgaatgtaggaggaattatggaaatagaaaagtcaccatttggcaaacacataatcattgaaggtaagaatcatcacaggattcgtgagagaaaggacgatgagacagaacatttacttagtctcaaagctcctcccacagacattcattaaacacagaggaaaactttttagtggagcagcctggcagacaccacctgaccactgtgaccaaagctaccagcaccaggatgaggctgacccaattgttgtccaggagtgtgctgcctaattggcacacatttgtgaattttccagttttccttgtacaactgatttttagctttattctactgggttggagaagatacttggtacaatttcagtctttttaaatttggtaagacttactttgtgacccaatgtgtgatctctcctggaaaatgttctgtctgcacttgagaaaaatgtataatctgccactgttgggtgggatgttctgtgtagatctgttaggaacatttggtctatagtgttgttcaagtcaactgatttccttcctcattttctgtctggatgttatccattcttgaaagtggggtattgaagtcttctcctgttactgtgttgctgtctttttctccctttagtcagtgtttgctttacatttaggtgctgtgatgttgggtgcgtacatactgataaccgttacatcttcctgttgaatcaaccattttatcattatacaatggccttctttgtcttatggcagtgtttgccttcatgtttattttgtctatcaaagacacttgtactcatatgcttattgcagcactattcacattagcaaagttacgaaatcaacctagatgcccatcaacagtggactgcataaagaaagtgtggtccatatacaccatggaatactatgcagccatagcaaagaacaaaatcatgccctttgctacaacatggatgtagctggaggccactatgctaagtgaattaacacagaaacagaaaatcaaatactctatgttttcacttaaaagtggaagctaaataatggctacacacagacataaagatggaaacaagagacactgaggactccaaaagtggggaggtcaagggaaggtctgaaaatctacctgttgggtactatgttgaccatttgggttatgggttccacagaagcccaaaccccaacatcatgcaatacatccatgtgacaaacctgcacatgtatctcctgaatctaaaattttgtttcaaacgaaatcaaaaaggaaatttcaaaaatatcttcagacaaacaaaaacaaaaaaacaacataccaaaacctatgggatgcaggaaagcagtactaagagagaagtctgtggcaataaacacctgtaataaaaaagaaaacttcaaatccacaacctatctctacaccttgaggaatgagaaaaaaacaaactatgcccaacatcagcacaaggaagacaataatagattagagcaaaaataaatgaaatagagaatacaaaaatgattttaaaaaacaactaaatttttagaaaagctaaaattgacaagcctttagtgggactaaaaaacgaagaagaaaagatgactcaaataaataatatcagaaatgaaagaggagacattacaatcaatgccacagaaatctgaaaaatcattagaagatgactatgaaccattacacaacaacaaattgaataacctatgagaaatggctacatcgtaaaaaaaaaacacaaaacctaccaagactgaatcacaaagaaatagaaaacctcaacagaatcacaactagtaagatgacggaattagtaatcaaaaatttcccagcaaaggaaattccaggaccagatggcttcactggtgaattctgtcaaacatttaaagaattaattccaatccttctcaactcttccaaaaagctgaagaggagggaacacttccaaacaaattttaggaggccagcattatcctaatcccaaagctagacaagaaccttattaaaaactacaggctaataaccctgattaacatggacgcaaaaatcaccaataaaatatagaaaatcaaattcaacaacacattaactaagtgagatttatctctggatgcaaggaagggtcagcacaggaaatcaatcaatgtggctctaccacattaacaaaataaagggcaaaatcacaggatcacctgcactgatgcagcaaaagcctatgagaaaattcaacaccctttcataacaaaaactctcaacgagccaggaatgggaagaaattacctcgataaaatacaaaccatatctgaaaagcccacagctaatatcacactccatggtaaaaaaaactgaaggcttttcctctaatatcaggaatgaagcaaggatgaccactcttgccacttctattcaacacagtagtggaagtcccaaccagaacaattaggaggaaaagcaaacaaataaaaggcatccaaatcagaagagatgtaaaattatttctgcagatgacatgatcttatatccagaaaacattactctacaagctatcagaactgctaaacaaatatcagcaaagttacaggatgcaacatacaaacattagttacacttctaaacactaacaatgaactatcagaaaaagaaattaaggaaacaaattcacttataataacataataacatcaaaaatactaaggaataaacttaaccaaggaggtgaaagacttgtacattgaaaactacaaaatatcgatgaacaaaattaaagatacaaatgaatacaaggacatctcgtattcatagattgaaaaaattaatattgttaaaatagctatactactcaaagcaatccacagatgtaatctccatctaaacaaaggcttttttttaacaaaattacagaaaaaccttaaaattcatatggaaccattatgaacccagaacagccaaaaccatcttgaaaaaccaaaataaagctggaggcatccactttctgattaaaaaatgtattgcaaagctatagtaattaaaacagcatggtagccaggcacagtgactcatgcctggaatcccagcactttgggagtctgaggcagaaggatcacttgagcccaggagtttgagaccagcatgggcaacacagagaggccccatctctacagaaagaaaaaaaaaattgccaggtgtagtggtgtgcacctgtagtcctagctactcaggaggctgaggaggaagaatggcttaagttcaggagtttgaggatgcagtgagctatgattccaccactgcagtctagcctaggcaacagagtaagatcctgtctctaaaaaaaaaacaaaaaacaagtaacaacaaaaacctagcatggtactgactgacagacatatgagatcaatggaataaagggctcagaaataaacttatgcatataaagtcaactgatcttcagtaaaggcgccaagaatacacaatgggggacagataatcactttaacaaatggtgcagggaaagctgaacacccacaagcagaagaataaaattgaatctttatcttataccatacacaaaaagaaactcaaaatgaattaaagatttaaatttaatatctaaaatgttaaaactccaagaagaaaacataagggaaatgcttcatgacttggtctctgcaatgatttcttggatatgacaccaaaaacacaggcaacaaaagcaaaaccagacaaaatgaactataccaaactaaaacgcttctatacagaaaatgaaacaaccaacagagtgaaaaggcaacctacaaaatgggagaaaatatttgcaaaccatttatctgataagggattaatatccaaaacgtataaagaactcctacaactaactactgtagttaactaaataataaataataaatgattaataaataacacaattaaaaatgggcaaaagatttaaatagaaacatttctccaaagaagacatagaaatgtcaacaaacatatgaaaagatgctcagcctcgtaagtaattagggaaatgcaaatcaaaaacatgacgatacattacctcacacctgttaggatgactattatcaaaatcaaaatgacaagtattagtgaggatgtggagaaattggagtccttggacactgatggtgggaatggaaaaaggtacagctgctatggaaaacagtatgaagtttcctcaaaaaatcagaaatagaactactaaatgatccagcaattctgtttatgggtatttatccaaaagaattgaaatcaggatctcagagagatatgtacacttccacatttactgcagtattattcacaatatccaagaggtagaaacaacctcagtgttcacggacagatgaatggataagcaaaatgtggtcgataaatacaatgaaatgttattcaatctttcaaaagaagaaaccctgccacatgctacaacatggatgaggcttgaggacattatgctaaaggaaataaagcagtcacagaaggacaaacactgcacgattctgcttagttaagggatgtggtcaaactcatagatgcaggaagtcacatggtggtttctggggactgggagaggggaaacggacagttgtgttccataggtatcaagttttcagttatacaaggtgagtaagtttagagatctgccataagacattgtgcctgtggttagcaatattgtattgcactcaaaaaaatttgttaaaaaccatctcaaggttacatgttcttcccacaatggaaaaaaaatgagagcaaactcatacatgcagtaggtggcccagcgtctgatccaggatgagctcagcacaccagagctctagtggaggtggtcctgccagtctccgaccacctgcaccacgctgggggcagcatccacccagcaacggctggcattccagctgagcttttgtttttctaagcgcattgcatacagaagtgctcgcgaatgtgacagctcatggggcacgtctactctggacttctgggacactgtcctgtttggttttagaaaattcctgggtcagcccttgaaatgagctgagattgaaatcagtcagcaatggtggaacattaatttccttttctccagtcacttctcagaatctttaatatatgatgtgcttaggggtgggtgggggaggaggttatagacactacggtgtcactttgacaactagttccaaaatgccctccctgtaaatgtccacggggttcagtgatcatttaaacccactggcgaaatttcctccattgattggtctttctctgcatgagaacacagccctcacctcttccagccccatgactctatgaactgtcctcaactattcattcattcattcactattcatcccttcagcctcttttgctcgctagagacctctgggcctgggctagctgtgcacccggaaaacagagatggaaatgcagggcctgggcctacaaagttctcgcaatacaggacaaggaacctcacagacaaagacaagctgggcagggagcatcctgacggaaacctgcaagacagacagtggaaggaggaactaagaacagccgggagaaccagggttgccaagaaggcctgtggggacgaaagagaatgtggaagacagacatttaggcaaatggacagatctgaaaagaaaacaaacaaaggatgccttgtgcagggagccgcatgcaactccacatgggctctggccagagtgtaaacagccatgatggagaaagagctgggagccgagtcaggagagtcgggagagtcaggagggcctttgcggcagtgggttctcagactccgctgcatactagaaactcctgggaggctggttctgcgttgttgctgctgctgtttttaaatccatcgtaatgaagtatgatttccatacaataaaacatacatatttaactgtcaagttcaacatattatgacaaatgtatacttgtataatccacacagagaaaagataaagccactccatcaccccctaaaccttcctcctgcccctttacaaccaatccaaagccctctcacccctccaggacaacagagatctgctttctctctagatctatctatctagaattcatataaatggaatcataacagtgtgtactttctgtgtctggcatctttcacccagcatgctttgttgaaattcatccacgttcttaagtggagcagcagcttgttccttgttgtcagtagcattccacaatactacaactattgatttatatatagttggctgcaggggttatttccagtttggagctattctgaataacgttgcaatgaacatcaaagtacaagtcttgtacaggcatgcattttcatttcccttgggtaagtacctagaagtgagtttgcttcattgtacaggagctatatgtttaactttaaaagaaactgatgaatagttcaacaaagtagccacaccattgtacactgtcaccagcagtacaggtgcgttccacctatcatacgccactggtcttctgggcaatgtgtgtgtaggagtgtctaatcgtggttttgacttgaatttccctgaaaatctgtgacattgagcatcttctcccatgctcattggccatctatttactttcctttatgaagtgtttgttcacatttttgcacacttctaattgtgttgttttcatgttattgagtaacaaaatttattcacgtattcttgataaaagagctgcattttcagctctaaatgtttgatgttgtccttttccttccactcctttcctcattatatttatgatttcctttaaattcttaagcataattctaacaatcaactcaaagtctgtgtacgctaacaccatcatccttatcatttctgagtctgcttccagtgacaggctttcctcccagttatggttcctatcttcctgctagttttgtagggcactgtgagttttcagttgacaaatgtctgaatgtcgctgtcatcctttaaagagtgtcaggtctccttttgattggcagttgcgttacctgtggagcagctcgttctttctgatgcctgttttccagtcctcttaaggcacatccagagtagccttcaccctggggccaggccggccccactgctaagtagggggcttttctgtggtctctcatccagaaggcctcgggtgtcccacgaggtccctcccctggctgtgaggctctgggattcttcagtgcacacctgcctggagttctctgcctgcctgcaggagtttcactctccatgtgttcagcttaggattcagcaatggccttgtggtgacccccagaagactctggagctctctctttgctgagttcctttttctctaatgttctgccccaaatttcagccccttggcctcctgcactctgccctccacccccgccactgagcaaagctgccattctttgccattccccatccctacccatccttatccgtcccaacccagccctacccatccctacccaaccctacccatccctacctgttcctacccatccctacccatccctgcccacgggcactaccgaattggcttctctgccctcagagaccacagtgctgtgctgggtgggttttggtttatttctggggggaggaaggattagggggaaggatttttgtctattatctgacgacccttatttaattcatccccccataatttttagtggtttgcagcaggagggcaggcctggcaccagttgccccatcatggcagacccagtgtgctcttagagatcttagggcgaaggccatgtccagatgggctgaattcttaggctctccaaatgattccaatattcagccaatttgtgaaaacaaggctttaagaatgagggatctaacattacaggtcagcatttcccagtcacactgtcacagtctggagagactgtaaactatccccacctccgatgatgattcaggcagtctgacatggggcctgcacattctttttaatatcgtcagatcattcaaatctaatgagaagccagaattgagaaacagatctgtaggcactggggagccattggaagatttcagaaacagttaaggccaacatttggtttcacactggagttggtggaagcccttaatttataaatattctcttagcaccatgaaagaggcaaggtgttcacgggaagactgccattcccaaggctgcccggcagcctgttgtgtcctctcttgcagctcttgaggccatattttaattttgattcttctaatcaagagcatttcgtgaatacctaatatgtgccagatgctgtctcggagctggggatggatacacaagtccggttctctgtcctcaaggagcccgcagtcaagcaggaagcagagaagcaagcacaggccacggcacagtgagtacagagccatgtccgctctgacaggcttggcagcgtgccacagagccttgaacaaaggagaggcgccctgtccagccccagcagtctaggaggctaccccaaaagacaggctgtctgagctgggctctgaaggaaaaggaggtgtagacaggcgaatgaagtggaagcactgggcacttgctctaatcacaaagcaacaaaaatataaaactgaacaggccagaagcctggacggaagggggagaggctgagaatggagcagcagtcagggcccacgttgggaagggctttggagacctctgatcctgtcattaacagagcattgaagtcaatatgtgctggcggaacaccttctccaggccagtcctcccaccatgggcttggagaccaggcccactccaacattacagggagcagggtgagaatacaaacagggccacctcccacgcatctccacatttacaactgcaaatcaagcaaagctaacagcccagtcacaccccattccctcgcaggtgtgcgcacactcaaacacaatacacgcacagccaggggcctccctgcagttcacccttctgacctgaggaaaaaggcaacaccttccaggacccgcctgaccacctgggagcctgagtggagcacaggtctgcagggcaggacaggatggggcctgggatggacctgcctgaaaccaggatgggcctccaccttccctgtacacagcgggctctctgcaaggggctgtgcctgtcattcccctcctccgagatctctgatgctcggtattccatcctactgggcatgatcagacctcagcatgatctcagacacggaataaacccacgctactgagcatgacatttcggtaggacgtgtgtaacctggctcctgcctgcttttccagcttcaccttctatttctctcgcccattccttatgtcctggctgtgtcctccgcagccccagggcctttactccagctgctgcttctccctgcctcttccactggcctctgggtccctcttactcctcaaggctcacctttgacagcgccctcagagaccctcctcacttcctgtaagccctgctcagcactatcactttcctgtttccagccttcacagcacctgccaccagccacattcctgctttcctgtccacttgcttgtctgctctcctactagaagatgagctcctatggggagcacaaacctaaccttattcactgcgtcattaccggcacgcacagtggcacctggcacatggtggcactcagaaagcttctgaggaaggaatggagggtcttcattccatccccaatttggccccagagccacccagcaccccgactatcacacactacttctcagtagccaactgtatgagtctgttctcacactgctagaaagaactttccaagactgggtaatttataaaggaaagaggtttaattgagagtttagcatgcctggggaagcctcaggaaacttacaatcgtggcagaaggtaaaggggaagcaagggaccttcttcagaaggcggcaggaaggagaagtgaatgcaggaggaactactgaacacctgaacacttacaaacccatcagatcctatgagaacccacccactatcatgagaacggtgtgggggaagcggccactgtgattcaatgacctccacctggtctctcccttgatacatggggcttatggagattataatttacagtgagattcgggtgggagcacaaagcctaagcatatcaccaacacattttggttttcagttactcctctttggcccacgtggccttccgcttcctgtgctctcacctcacgtcaccacgcagtcaattctcacgtacctttcacgagccaggtaacacggtactcactttgagaaataatcctacggccatcttgttcttagagctcctagttgatttagtgtatgtccctgttagcatgtggcattccagggctctaaacacatcagactgtgccttatccaagcctataccataagaggcccaggagaaatgtttgttgaatggatcggggaacagaacagtgaacggcaataaagaaaacttagattttgataatcagtaaaaacagtacctgagtactagtcacactataagatttagtgcatacttttttccataaaagaattatttcggcaggatgctgaactaatactaactagaaatatttctgcttttgaggaattgctctgtgtttccttaagagcgggacttgcgggcggggtatgcatcaaatttctccgagtgtctcctcagtggcccatgttgcctgctctcttgtcaccctttcgggttcacaatttgcccgcttcctatcacacccctaaatgcaaggcacacgggtggccctgcctcccgaaacatgctggcccctgctctgcctctctgttgacactgtgtctcctctttcctgccagcaaaaattcgactctctgctgcaggccctcctaaaatggcagttcctccatgaagtgaaggatgaattcctttttctctgtgtagccatttatctagtgtggttttgtgactcagtgcatcagaacagcatacctgtctacaatgacatagtcacataattaattttcccaactcgactgttacacttggcaggaataacaaatttctatgccaattatacactaacccacatgaccctttcctggaaaatatgaaaaatagcattgtgttcatacaataatgggttatgtgaaatggtcagctttcttttaccttttctggttttacaacgtgacattcatcgatgtatacctagagtcctgtgcaacatgagctggaggttgccactctaagggtaaaaaggaagcggaaacagaaaagcacaggagcgacaaggaggcattttaaaacggatgaaatataaaggctcttaggaaaccaaaagctaggatggcagtctttatctctacctgatagcacacgttgcatgccagacccagagctcctggaaggcaggaaagatattatacttgtgaatttcccctgcaggcgcacagggtcctcccagaattagagaggtaacaaagcaaagagaaattgacatgcatattccagaggcttaaatgctggagggctaagtgcagcggcaggaagctgtgaagaaaagaaaacttcagattcttgtcctgggaattgcacaaacattagccagtgttatctcagcaacattactaattcctggcaataggatctctaggaggtatttctctgtgactggtttggacaccagattaaagaaaaaggatacagtattatggcctggatgtgctgctagtatacaaaagactccccccattcactgcaggattgtaaaggcctctacccatccaagtctcctgaaacaatgtttgtccatgggaactacaagtgcagtacctcttctctacagtgagaagaaatgatcctgttacattcacacaactgtcatctccccttcctaatgagcacagacttcgcccaaaggataaggttggtgatcttggcagtaagatatcatcccctataaccaaggaagacattatatccatatgcttaatacaacttgtattgatgctccttaccacggttatttaccttgccacaataatcccttaagccaaaatctaatccagagcaatgccctaactctctttaattctatgaaacatgagagagatgaagaagctgcaaaagaaaagtctgaagctagcagaggttggttcatgaggttgaaggaaagaagtcatctccataacataaaagcgcaatgtgaagtggcaagtgctgatgaagaggctggagcaagacatccattagacctagcaaagatcattgaggaagatggctacactaaacaacagatttgcagtgtaggtaaaacagccttctactagaagaagatgccatctaggactttcatagctggagggcagaagtcaatgcctggcttcaaagcttgaaagaacaggctgactgtcttgttaggggctaatgcagctggtgacttgaatttaaagccaacactcatttcccattctgaaaattcgaggacccctaagaatgatgctaaatctactcagcctgtgcttttaagtggaataacaaagcctggatgacagcgcatctgtttatagcatggtttcctgaatattttaagccatctgttgaaacctactgcttagaaaaaaagattcctttcaaatattattgcttattgacaatgcaccacgtcacgtaagacagctgatggagatgtacaagaaggtgaatgttgttttcaagcctgctatcacagtatccaatctgcagcccatggatcaaagagtcctgggaattttgcaaacattgacatttgccaatgtatctttacatgtacatgtattctttaaaaaatgcattccataaggctacagctgccatagatagtgattcctccgatggatctgggcaaagtacattgaaaaccttctgtaaaagattcaccatgctagatgccagtaagaacattcatgattcctgaaaggaggtcaaaatagcagcatgaaaaggtgtgtggaagaagttgaatccagacctcatggatgactttcaggggctcaagactttggcagaggaagtaactgcagatatggtagaaatagcagtagaattagaattagaagtggagtctgaagatgtgacaaccgactgacatgtgactcttgtggatgaaatccaccactgatgaacaggagggagacatgggagcagtaagtggggtggagagttcacagaagcactttgtaagccccgggagacctgagcctatgtgaagggagacactgaagatgccgatggtcatcagatggctgtgagctccttaagaatggcgattgtgctgtgtttaatgtcgctcccccacgggccacacaatgaatatctcttgaagtgcagtgaattgaactgaactaagttgatatgagctggggcaagacctgtgagattgagaatacaggcaaaatgaaatgtctgtctgagaaaatgaataccagaagtttttattaggtttactctagactacaatttgtaaatacgtcaatgtaaagacattaatcagtgagtaattacatgcagcatgcaattctcaaccagcagggaggtacttaacacctactcggtgcaaagcctatataagtccaatatataatggaaaactattgtgtttaaaaagaaatctgaaaaggagacagagatcaaagatacctggcaccaaaggatgggcaccctcatctcagggagcagtgccaaggggcacaaagcatgcctgatgaagggaagctgcagtcttttccctgcagcacttgcaggggagctgtcagaggaagaaaggctcctgcatgtgaagccaagccatctactgacaggcaccctctccaggttccagctgtaagcttagggaaaacatctgtaaggacaagtgacaggagtcttgaatagggtaaacgtatttcctctgcttgaaacatttttgtcacatatctgttcaacagaatgtaagcagtcattcagagaaaaagccatggcttatgaaagacccatttctttctaattcaatcttctaaggtttgttttgttttgttttgagacagattctcgctctgtctcccaggctggagtgcaatggcgcagtcttggctcactgcaacctccgcctcccgggttcaagtgattctcccgcctcagcttcccaagtagctgggactacaggcgtgtgccaccaaacccagctaattttttgtatttttactagagacagggtttcaccatgttagccaggatggtctcgatctcctgaccttgtgatctgtctgcctcggcctcccaaagtgctgggattacaggcctgagccaccacgccccaccaaccttctaagtttttaaatgatcaaattgggctcttggcaatagaccacctgttctgatttccctcaatcccatgagaactactgtccatgtccacttacgtgaggacagagcttggtccctggttgcatctaagcaaagaaaagaactgaaagcgaacttgggggcatcttcctcaatttcttcattttgcagatgaaaatccagagaagagagtgacttgatcaaggtcacagggcaaataaagggacaatataaacacagtaaagggggtgagtatcaaatacaagagtcttattttctttctctatatgtgttattaacctagaccaatcagagctcatgcagagaaaaggcaagacttgtgagaaaaagatgttgcaaaggaaggaaagaagtccagagaagcttggctgccaacttcagtgctctacaggactgtggaaagaagaactgaggcacgcatcatgtcaccagtggaagcacctggcccatacccagccccacacctgcagtgtctgagcaggcatgttttctcattaggcaagtaaaacaagcggatttatgtgtccattttttgttgcccgtattgcttctgaactttgcacttacctatagtatgtgtatgcgggtgggtggagacctcgtgtgggaattgtcagtctcctgtgtctgagctccttacaagcaaggattatgacggattcaccctcacggccccagtgctatgcgtgccacccagtaatagagcagagctgcctggggaagtggaaggcttcatggaggtgtgacattgaggcatttaagaaagaaatggtagcttctgaagggatgaagagaatacagaaggctttccaggcaagggaagcagctctgttttctgctggccatgagcagccttgaagacacagatgccaaatgcaaccagaagaccaattagacttgcagggaactgagagaagtcacagtcacctcgcatcagggcaaagacgcttgggcaggctgcacaagtgacatgaactcttacatttggaggggaccttcactcaggaattttaaacaattatgaattaaataagtttcactttcaaaaacattcccatcattaatattgctcttccaaatgaatgattcaaactcagccacgcttgtcatgaaatcaggccgctagttaaacaagaatggatgatcacctgccttatgaaattcttcaatcgaaatagcttaattcatccatttgtattttgcaggccacaatcaaagcctaattagtttaccacaaacagcactactctggacgcttgttcaatctgcattcagaacagctcttcatttggcacaacgatatagctttgcctaataaattaaatcagtgagtattaactacctgaattatgcatgaacctttctgtgtcaatgcaagtttgattatttaatctgtgtaactatattgagtaattcacctttgaatttcccttgcatccacaatatataggggataaaaaaacacaagaaggaaaagatttttaaatgatgccgacaaactcactttttgaaatgcacaagccaactggctgtgcctgagtccagttcccagcacaagcaaaatgagcaggccatgcccagggctcagagcacagttacgcttatcaaagggagctgtcccgatcccctcctgaagccgctgtgctcaaggaaccattaaagaatgcaagcataacagcagaattcagtatctgctgaagaagaaaacatattcaattgaatgttgctattctctcaccactgagtgtagcagtggcgcagaaacctcagggcccacgatctgaaggttggctcaaagcccactgtcaaccttccctgcccaccccacctgggcaaatcagcaacttaaggcctcagtctattcctctaaacagtaagaatgtgatccaccttaaacggcgggggtggaatttggtgggcatgggtaaggcaccaagacgtaagtgctcagcacagaggtctgaaaaggcctcagtgttgcttcactgagggcggtccctctgggccctgtttacttgcacgcaacttataaatgagtataatctgcataaacttagacaactttgtggcctgcaaatcacattaatataccccatatgaccccacaatacagcatcacttaaataaaccataagccaccagaaatgtttcctgctgatgggtgtatcaggcagggttctctagaggaccaatcagacacagtgtgtgtgcacatgagacatgagaggggatgtattaggagaactcaatccctaggttcaccacaccaagccgcctgcaagctggagaaccagaggagctgcaggtccgaaagcctcaaagccagtgaggccagtgctgtagcccttggtccaaagccacaggccgagaaccctcgaggctgctgctgtcagtcctagagtccaaaggcccgggagcccaaagttctgatgtccaagtgcaggaagagaaaagtgttccagctccaggaggggaagacaattctcctctcctctgcctttctgttccacccaggcccccggctaatggatggtgccacccacactgacggtggatcttcaccacacagtcccccaactcacacgccagtcccctcagggacacacccagcggcaacgcgttaccagttctccaggtattcctcaatccagtcaaggtgacaaccaaaattcaccagcacgaggggcactgaagttgttctcgtatttgctaatacaaatacacttggaagggcatcttcacgcatacctttttttctacttttgaattattttaaggtagaggcaacatatagaaatgtcacagcacagatgatatgtgttaacatgcagccttcttaagacattgtaccaacttacattggcaacagaaacatattcatatgtcagtctccataaactttgtcagcactggaattaatgtaaaaaaatccatgcatatatccataatacatacgcatatatataatatatacatacctacctacataatgatggctcaaagctatgtgatttttctttcaataatcgacacttaattagtaattccatgaggaaaaatgatgagaaaaaccagactgttcttgctccataattagacaaggagctccttgaggggaggaacagtagggcctcgtttcgaaattgaccatagtgacagaagagtgtggcaggttctcaaaacacgccaaaaactggctcagaaagatcaggctgctcaccagcatttcacaccagcagggctgtcccctaaagccacacacacagactctccatagagccacacatgatcaaagccatcagcaggcccaggaaacacttccaggagggctggagacaggcaaacaagcattgccaggcagctgtgggtgccagcccctccacgtctcttacctacagccctgggtgccaggccctccacgtctcttacctacagctcaggctctgttgtgaagcagagggacggggggcccaggccttggcagcactcggccagaagcaacgggagcaggaccaccaagcgttagtgcgtgcgatcgttctagcatattgagctttggtgccccatattatctcacctaatcctcacaggtaaatattattttttctccaatttccagatgaagaaatggaggatcagatcatgaaacctgcctgagctgaagccaaggctaagtgataacagctgattcaaactcatgtctggcttatattgaaacccactgccttacctacagcttgtggttgtgcctgatggactgagctgcaagaagggactgctggaggccaggaacctctgtggaccagccctcgacactcacagtctcgctctcactccagcggtcatgctgctcagtccctggccctaaaaggcaccagatctactttgtcctttaagccccaaccaggcttcttctgtgggcaaggagactggcagaaaagaacaggcactttccctggaagagtgaggaaacacgggctcaagcgtgcagtctcccccttagaaagcagccctgtgatactggaggaaggcacaatgtcttgggaggccctgacgtgctggacaaaggggccttccctggagttgcacagtcctgccagaggcccggtgcctgcctctggaaccctcagtctgcccgtgtagatggggacggtaacgcctgccccacagggtctctgggggttaagttgatgacacatgcaataatgcaggggttctataagcagtggctcctttctctcaatgggcctctctggacaagcagataccacgctctggctcataaaacgcacaaaagctctgagcaaattgttaagacaaaagtagctaagagattttgaaacacacacactgcgtatgacaagcagtagggaaaagacaacaccatagcccagcggggttgatcccgggaaaacaaggaccagttagcactggagtcaatcagtgcgctctgccacattcacaaaatcaatgattaaaatcacacaatcatctcaactgacgcagaaaaagcacctaacaaaactataaggcataaaacagagcagcagctgtcaagagtttggagtaggggccagggttgcctacaaggcagtatgaggggacatttttttaaggtgaagaaattgttctgtatctttattttgttggtgtggtttcacagataaccttgtcaaacctcacagaattgtacaccaacgagagtgaacttcagtgcatgtaaattatatttcaatagatctgaatttttaacaaatgaagaggcagccgggcacagtggctcatgccgtaatcctagcactttgggaggctaaggcgggcagctcacaagtcaggagttcaagaccatcctggctaacacggtgaaaccctgtctctactaaaaatacaaaaaattagccaggtgtggtggcatgtgcctgtaggaggctgaggcaggagaatcgcttgaacgcgggaggcagagcttgcagtgagccgagactgcgccactgcaccccagtctgggcgacagagcgagactccgtctcaaaaaaaaaaggaggaggaggaggaggaggaagaggaggaggaggaggagaaaggaaggaggaggaggagaagggaaggaggaggaggaggaggaggaggaggaggagcggtggtggtgaagaggcaagccacagatatacactaggagaacgtattatatctatatattcaatgcatatatatatatatcttcactatatgtgtgtatacataacatagtgtcactatatgtacataaatatatgtgcatatgtatatatatatcttcactagatacatcttcacttcactgtatatctgacaaattatttagatccagaatattcaagaactcctacgagtctataaaaatacaaacaacccataaaatgaacaaaaggcttgaacagacacttcagaaaggaaaatatatgaatggccaataatcacatgaagaagtgttcaatgtccttagaattagggaaccataaattataatcaatgaaaagataatcaccagaatgactacagttttagaatgtgatcccactgtaccatggtgaaggcgcacagcaccggagctcttacactgccgggggaatgtaaaatggagcaacgattttataaaactgttttgatagtttcttatagttaaacccacgcttagtatatgacctaacaattctaccccttaataactcctagtatttccaatttatcaatatttccaagaaagaaaaatcatgtcaacaaaattacttgaaaaatgttcataacagctttattcataatagtcaaaaactgaaaacaaatgtctatcaataggagaataaacaaattacagtgtgtccatgcaatggattactaattgagcaataaaaagaaatgaactactgatacaacaactgggataatctcacgaacattatactgagcaaagaagcaggacagaagagcacttatgctgaggtgcctattatgtgacactctaaactaggcaaaggcaaaaacatcagaactgaggacacctctagttagcgtatggggattaacctagatgggatacaagagaactttctggggagatagaaatgttctacgagggagaagggttaatagaatgtatccatccatccaaactgtagagttaagatgtgtgtgtttaaatgtgtgtagctttaccttgaaataaagtaactgaagctcattatcatcatcattctcaacaccgtcactcagtatgggatggtgacctgggtagggatgataaagatgggaatggctcaacgttgatgattactgaagctgttaatggatgtgtggatggttcctcacattcttctgtttactttctatacgtttaaaattttccctagtaaatgagttaaatttaatcacctattgcatccctgatatacgtctgccttgcatgttcacacctgtgacctcattaaatcctcccagcaatcctgtgaggcaagtccattgtccaggagaagaaaatgagacgtggagaaccagccaaggacccccatgtcgcctttcatccctcctgccactgcccaatgcaggtctttaccgtcacagacaggaagtgctcccgatcacggacaaaattccaaaggcatcgtgggtcagacagcacggaatgagtagtgcagggcaggtaagcagacctcacagaggtccagaggacaggaggcagtcagggttgctttcctgacaagactcctcctcctcctacacccctccagcccagggacactggagtgggcgggccctgggacacagcatcccccgaactacccagcaatcagaactccagtggtcacagccgtgcttcactgtcaccctaaggaagaaatgctcagaaaagccactactttgggcttcagggcaagtgcatccccttccagcttttccccgtccctcttcctcatctccaaaagggaggccacttcatcaacatctgcttcccgtccaccagggtccctccgtaggggaaggaaggagatgcacagaagatggcagggtgggaaggatacatggggttcttggctgatgtcgctgcacttaacaaacacttactgggctctcgttgtcagacagactttgttctgggcacttgaaaaactcagaggaaagacagtccccgccctgagggggccaattccttaggagaagacaagcaggatcaagctgtgaaagacctcagctcggtggagtcacaatctgattgtgggcaatgcaggcctcttgaaagaagggccgctcagtggagagctctggaggtccttcaggaagagagaacgtcgggcacagacaggaaggggtcagagggcagggactacgggaccacagcaagtagctgggcctctggtgctgttgatcgccagtggtatgacctgcattcagatgctgatccctgtaagcacctcaggaaaattgctacccaatttttttagatgaggggactggaacccagaaaagagacatcacttgcccaatgtcagccttcatgttagaagagatctgaagcctagacctcctgcctctgacccactctcctctgcaataaaaggaggcaatgtgtgcccatcaagaaggtgaccatcagagccctgcagacagggctcggccccagagcaggtgactccagaaaaacaccacccttctttgccttctaggccctgcgtcttataaaatggagttaccgacacctaccacactagactgtcttggaggttaaatgctataatgtacataaaactattcacagagaaactatgtttttattgttactcattacaaagattattttaataactcttgactagttggggccaacttagtagcagctctgtgtggtcatcacggagtgaagacagagaagatcagcccacagacagcacgaatgtcagacctcaactctgtcattatggacaaagtccccacatccctctcctcctccagcctgcttatcgccaccatgtgggatgcaaaggcacttattcctcctccattaggagggtttcagcaccatggaactgccttcgctgccgccatataagtagctagccagtgtcatcactgccaccaccatcatcagctccaacatttgttaagcatgtatattatatgcacgtcagtaaagtgagcacggcacagcatcatcccccttctttcctataaccacttttccataggagaaaagaagaggctgccaagtgttcggatgcccttcactgtagaggcatccgacacattggatgtagagccaatgtctgtgatatttctagggctgtacacattttcaccttcagctgcaacagctgtaaggaaaatatccttctgaagctggacacggggcattttgactcacttctgcttagctgccttttgcagttactgatttgaagcaactaaacattggagtgaaatctcttatgatagcccacttctaatgcaacgataacgagaagagcagtgctaataataacagctaacaggaagcccttgctttcctgcaggctttgcacatgattcttgtaaacctcaggccagtcctgagaggaggtgctatcacgatccccattttacaggtggggagatggagagacgcaagctgtccaaccactcttaagcactgtatatatacatagcagcactgtgacgagtctacataaggaagagagtttctgatttgcatgtgtggaacacagcatggcctataaatgtccacttgatgacatcactgccaaaatggcaccccggagagcctcgaaaagagctgccctcccctggctgctgtgtgtgtggcccttgctcgtcagtgggccttcggtgacactctccagtgacaccaccgtgagagctgcatccttgctttacaactcgtgcatccttgcttcacaaagtaaaaagtccacagacactgttctttctgaaaaagccaggatctagctaggatcaaacatcaaagaaagtgaggtcaaaggaagagtgcagaggagagcgccaggcctcccgagccaacgtgtgtccatccgcattccacgctgtgtccctcaggccatggggcccatcccctctgggtgcccatctgaaactcagagatgacaacacccgattcctaggccactcactgtgaggtctgaatacgatcacgaagatcggccgtggcaccccaaggctggccttggcatcggcgcctactgtcacacagccctcaccaaggccacatccaagctgctatgagttcatccatgcaagcaactatcatgcgccagttaaaatttgtagttgacatagatgtaattacatctgacataaacataaaatgtaaataacatttatataatgtatagaaaacataaccacaaaatcagctgggtacaatagttcacatctgtaatcccagcactttgggaggctgaggcagaaggatggcttaagcacaggagtttaagaccagcctgggcaacatagcaagactctgtctctataaaaaatttaaatattagctgcgcatggtagcacacacctgtagtcccagccactcgggaggctgaggcaggaggatcgcttgaacccaggaggtaaaggatacagtgagcctagattgtgccactgtgctccagcccgagtgagagagccagatcctatctcaaaagaaaaaaaaaggaagaaaatataaccacaaaatataaatataatacatatttgtttgtgtattgaacaaatatcttcccattagactgaaagcttcatgaggacagggatcatggttcacttgttcaacagaagataataaataatggttgagtaaatgaataaatgggtgaatgaacataatccttgctcttagggaacatgtagcttagtggaaaagaataaaaaataaaaagataatctaatgactttctagctttcttttctgtcatctcagagagttaggtaccaaggcaggtgtgaccagatgcctactctctaagagctgaccccagagatcccagcctgagccccagggctgaggcagcccagagaaggtgccttccgctatcttctgcttgcatgcatttgagcagggcagatgcttgctggggggactccaaggccaagtggctggtcgatgtgatgtgatggacaaggcaaggacacagaacagggagaggacccttccccactgtggacatcaggagtcgcttcctgaacaaggcggcagctgggccaggccccagggatgggaccagaaatgttgagatggggagaaagcaatgcaggcggaagaatgattgtgtagaaaacggaaaggcaggaaagctgcaggaccgcagggccagaacaagagaaacctgggagaggagatggaaaaggctgcgtggccccagatagaaaagtccagcatggacaatcgtgatgtttcttatggaaaaacatgactttcctcagaaaatggagaactttatcctgcatttgtcatggagataaaataattagatacaaagtgtgaaaaaccagtaacactagtagaaacactgcaaggcaaactgtcttcaaagcatgcagttcatctccatttaactggaaattactgtgaaagaaagaaaaactgtcccagaatcagcttccagacaagaaagaacctgttccaaaccatctcttcatgcttttctctgcgttcaaattgcaaaaatacaaagttgtatagaattttggaagaacttttcagagaacatttcattttaacaaaaggcaaggagaaaactgcaaaagtgcttgtggttttatagcagtgccatgggaagacactgctgttatgctgagagaaggtaagtcacgcaggagtggctggactcaagttcaagcccaggcttttcagcactctttgatcccaccaaaatcttggcctcaggcagggagggtggagtggcaactgcactggatggaggcttagtgaggtacatggctgaacacgggggagggcttccagatatgggacagaaggccagaggtgggatggggcagggatgaatggatggaaaagagcttcctaggtggggaaaggaaattattctaggaactgaaggcagtatgggcaaaaacatgaatcacaaggacaaagaggggtctgatagaggaactgcacccactttaagaagaggcagctcagggttgagaatgtgtcatcttctgaggagcccatgcaggaactgagaggatgtcacatgcaggtacacaggagccacagtcccaaactcagaggtctgcactctaacaccaggtcagccacctcccctccctgcccccagtcaccaccagtcaacagggggcctacccagcaatggctcaaggcttttcaactctgacattcctaaagctggatggatcctatcatctctccagcaactgtacagctttccagtgatatggtttggctgtgtccccacccaaatcttatcttgaattgtagctcccataattcccatgggaattatgtcatgggagggacccagtgggaggtaactgaatcataggggtgggtatttccaatgctgttttcgtgatggtgaataagtctcacgagatctgatggttttataaaggactgttcccctgcacatgctctcttgcctgctgccatgtaagacgtgactttgttcctcattcaccttctgccatgattatgaagtctccccagcaatgtggaactgtgagtccattaaacctctttcctttataaattactcagtctcgggtatgtctttattagcagagtgagaacagactaatacagatggccagaagcaacaaagaatctgagaagagttcagactttgaatgggtgacacttagttcactcttggttctgctcctttaacaggtgtttgaatttggcaagttccttaacttgatgaggccccagagaagtaagataacactcccctggaaagtgcctccaggaccagagaggccacaagcagcggctccagcagaaaagaggcacctgcagaagggcagtgaagtttgttcatatttattacaagtgctctccctacacccaaggacctggactattgttctccccactttataactacagtggcacactggcaacaaaaacgtctaattgtgcataataataaaaaggcaggccaggcatggtggctcatgcctgcaatcccagcactttgggaggccaagagggcggattgcttgaggtcaggagtttgagaccagcctgcccaacgtggcaaaactccatttctactaaaaatacaaaaattggccaagcgtggtggtagatgcctgtaatcccagctactcaggaggctgagccaggagaatcgcttgaacctgggaagtggaggttgcagtgagccaagattgcaccactgcactccagcctgggcgagagagcacaattctgtctcaaaataataataataatgataataataaaaatgaagaagaaggaggaggaggaggaggggaagaagaaggcgatggcatcactttcccctggtcagatgttatttcagctcaaagtttgctttaagaaatgacaccttggaattaaccctgtttcatcaaaaggccaagattcccaagaagagatgttgaatgatccaggggaatcaagtacatacaaggtcatagaaggcacatacatggtcagtgatgaacattccatatcatgtgtgggtctgtaatagttctccctgtaacttaacactcagcactgtggaaattgagaaccacatgagtaaactttctttcacttgtgatgcacaacagctaacagtacaaaacaccacgccacactcattcttgtcttagtccatttggtgttgctgcaacagaatacctgagtgtgggtaatgcgtaaagaaaagaggtttattttgctatgattctggtagctggaatgtccacaagcatggcactggcatctgttcggcttctggtgagggccatgggctgcgtcaagatgtagcagacaagaagaaacaccagagggcatatgcaaagagacgtgcataaggagtgagtcttgctttataacaacccactctcatgttgactgatccagccccatgacagcgagaactctctcaggagacagcaccaatctattccggagggttcagcccccatgacccaatcacctcccgctaggccccacctcccaacactgccatgctggcagttaaacttcaagcaagagttttggtggaaacaaaccacatccaaaccatagcacctgtcacactcacaaaccctaaaaacatgaattctagtgctatgggccagagctttcatcatgtgtgtaatgaacctgcaaacacgctcaagtgccaaagaaataggcacagaaccagaaagcttctgttgaatgcttcagagcacaaagggtttcatgtccactctctcccgaggtcctcatggaaggatggtgaggaaggtgttgccatagcccatggtgtccacggtacaaagcctggactcctgctgtgccaccaaccaggaaagccccctcctccagggaggcacccaccctggctctggaggtgtgaccaaagttttctcagagaagcaaggccaagattaaccatcctatgccatctatccccagtgcgtctgcagctgagaagcctgccctccttcctcagcagcacactctgcctggacctctgctcctcacagtccactaccacatctcaggctgttcagcacccatcagcctggaatcccagctctggcgtctctccacagaagatggctccaatgtcttctctttattctcagtattttgctccacatagtcaaggtgaagaataaaatgaatgctttttttttttttttttgagacagagtctcactctgttgcccaggctggagtgcagtggcacagtctcagctcactacgacctccgcctcccaggttcaagcaattctcgtacctcagcctcctaagtagctggaattacaggtacccaccaccacacccagctaatttctgtatttttagtagagatggggtttcaccatattgaccagggtggtctcaaactcctgacctcaggtgatccgcccacctcagcctcccaaagtgctgggatgacaggcgtgagcactgcgcccggccaatcagtacatttagaaatgcacatttgattcctgtgtaaggcatttcgcataaaaacacttacaaatgagggaaaaccatgtcaagtcgcacgttcttttggggcggggaccagaaaaagatggtcacccaaatgtttcaatctgctattctctcaagacaaggctgccttccacccaccagtccatgtgcccctcagtccatatctctgtcctcagcattgcgcccgaggcccggcctacaggaggaactccgtgaatatgacttaactagcactcactgcagtttctagatgttggtaccatctctgcctctcccaggggaccacgcacactcttactcacctccaactcctcaggcccagccttctctagcacacagcatgtcttcaaagcaagcctgggaaccaaatcaaattgaagcgtgcttaacaagcaaaggatgttgtcagggaaagcagcagctttaaaatgttttgacccatttcttccttatctgaaatgtgagtttctctccagcccatatgaaagccacatgtttctgttatcagacccaacagccacataaaagctacatgtttttctgacctgggcccagcagtgatttttttttttccctaagaatttaaaggaaggaagaacctgaaatataacattagacagcaatgtgttttctaaggatgaaaaatgtgctgaataaagtgtggaatcattttttttcctcgacacaaatataactccatcccagcttgccccagtgagaaataatgccccagaagcatcagcagaaagggcatctgcatttcccaaataataaagacaggtgagaggcgaaagtgccaccatgtcttgatatgttaatgcattttaacaacctaattaacattaggtggtgacagatacacaaaagaaaaggggtaaaggagtaaaggaatataaatgactgaatttgaaaatactgctttgaatagcctagcctttgacaaactgttattaacttcatatttttccagcctgatgttcacattaatttttctgctagaaatacagcttttgcaaaagattgttaaacacgttcttttctcctattgttaaacaaaatacatcaaaatggtctgatttagttcaagattgtgtggctggaggtcacaattctatgtatttcagacaaggggcatcctcaaactcagctggtcacgttgacttgggactgcttttctgggaagcaatttgacagcaggtaacaaaggacttaaaaatgttcacattggccaggcgcggtggctcacgcctgtaatcccagcactttgggtggccgaggcaggtggatcacaaggtcaagagatcgaaaccatcctggccaacatggtaaaaccccctctctactaaaaataaaaaaatcagctgggcatggtggcatgtgcctgtagtcccagctgctcgggaggctgaagcaggagaatcgcttgaacctggaaggcggaggttgcagtgagctgagatcgtgccactgcactccagcctgggtgacagaatgagactccatctcaaaaaaaaaaattcacatctttggactcagtaattctgcttcagagaatctatcctaataatatgaccaggaaaacctttccacggagatatcaaacagtgtttaataaaattacaaataaatggggcagtatctcaaggtctaacattgggaaaaatattcagaatattctgataacatcgctgacagtctttacaattacactgacgaacattgagtggaatgggaaaatgcttctgtattagcgctgagtgaataaggtagagcgcagaaacgcacacgcaacgcagtacccagggaagagcgagaaccacagagagaaaggtgaggacggaaatctcagcaccaccgttcacaagctgggaggtcttggccaaaccacctaacctcgctgcccttccatttctatttgtgtaaactggagaaaagaatacccacagaagggtttggtgtttttttgttattttgtttttgtttttgtttttgttttttgagatggagtctcgctctgtcacccaggctggagtgcagtggcgtgatctcagcacactgcaacgtttgcctcctaggttcaagtgattctcccacctcagcctcccaagtagctaggattacaggcacgggccaccacatccagctaatttttgtatttttagtagagatggggtttcaccatgttgaccaggctgcttttgaactcctgacctcgtgatccgcccgtctcagcctcccaaagtgctgggattacaggcatgagcgccgcacctggcccaggcttgggtttttgtttgtttgtttaagattcaggatcttgctgtgttgctcggactagagtgcagtggctgttcacaggcaccatcatccaagtgactgttttaataaaaagcttagaatagtatgtatcatggagtaggcactcagaaaatggtagctattattattataattatgcatagaaaagggaataacaacatacaatgattgaggctgggcagtggaaccatggttaatttttttcctccaacattcttacaattttagcatcttctatagtaaacatgttatactgctataatgaaaataaatctctataaatctaaaactgtccacttaaaaatcctaaatagatagggtaataaaaatattattagtctcctcactttcacttcctttctgcctcagatgggaacccagctgttttaatccacatataattgcctcatccatggtaaacaggctgagcgtgtcccttctctggttaaaagccttcaatagtagcctataggatgatatccaggctcaccacatgacactcaagggccttcatgatctgacccaagcctacctttctaaaaggccagcatggaaatcagaatgtatcacttccccagtgctaatgtcgccttctgagttcttctgcccaagaaccgccgaggacaaggctgctgactgacaggcaggcccaggactgtccaaggctcccagtggtgagcagcatcctgaaagatctggcatggtccttggcccctcagccaggtgatgcatctgtcagaaagccctggctctggggcctgaaacctcaaagggtaggataagctttttcctcccttggagacgtttaccaagcatgagtaagtgccagccacagggctaagctcttgcctggtatcttctatccttggagtaagtgtatcattaggctcctgttacagacaggaaactgatatccagtggggtatggtaacttgcccaagaggagaggcctgggatgagcgttaggctggactccgaggcctatgctcgcaacgctcgactctgaaagctttacatctgtgtgatctatagccaatccaggtacagattcatggagagtggagatgggggtgcagggagagcacactctgcagagctccatgtttcactgcaaacaccttttgcaaacctcatgccccatgactctttgaaaaagagagttccccgacgctccacagtctctcctgctgtagttacaggagtgacgtggactatgtgatgaaggctccacgagcccacacgcccacgtccagcaggactacaccacttgcccttattttacactttgggttcctgctgcataagtatgtttgcagaaagaatcttactgtttaaaaaaaaaaaaaaaggcttggaaaccactggtctagactgaaaaacagaaatttcaacctcttgtatctttaccatcctgataaaatctctctctttaaatataaaccatcctttcttttccatgcagaagctctttctgttgtgaaatgagaaccaccaaaacctctctcgaatggaaatgccagggaagccccgtcaggcagcccggcctaagctctgaggactgggttcactgaagccgacgtgctggagggagcccaggactttcaatcccaccaggtgaccaattctgctatttcagagtgagcatcccccttctgctctgcctactcacttagagaagaaaggggcaagtcatggacggcagcagcctgctgaggtccacgccaccctgcccctacaaaagcagatgacagcctctgctgtgggtaatcgtgtcccgatctggcgcgttccacatggggagccacagcctatctctgtcaacgcattgcctctcatttctctgattcattgttaaaaataaacatttcttcttcaaagtgctggcagaactctcccctaagcctatagcttccccccaccccacacccccttaggaatcactgtggttttttctaagggtaggctggcagaaggaaataaaaatgaagccgttcagacttgcacacacaactctaagaagacttctccattttctaactatgactttccccacctgaagcagaaggcaacctagcaggttaccagatccttcccatcctcctgaagactaaaccagaaacaaagcctaaccagggcttggatcgtgtgctggagagcgggtatggtgtgggtgaaagacacaggttttgaaatgtgctaccacaaagaaagtacaagaggatcccagagtatggaggatgaagaaggaggggagagaggagatggtgggagaggaagaaggacaggggaagacgatgaaaggagcagggagaggcaagaagagacagaagaagcggggtagaaatggaaggggagcaggtgaggcagtcggttgaaatgacacgtctctccaccaacaattttgcactgcagccccacatagcccctttcctctgtgatgagggcagcagcctccccatggctctcaggggccacagctccacctgtgccctggtgcccagctcctgctgcctctgggggattggtcccaggcaccccatcccgtcctgctccacccgtctcttccactgttcaatccttgtcagtgcacacaatcacacactgccaacaccaccttcaaaacatccctctctcggccaggcgtggtggctcatgcctgtaatcccagcactttgggcggccgaggcttgggatcctgggtggatcacaaggtcaggagttcaagaccagcctgaccaagatggagaaaccccatctctacttttttaaaaatacaaaaattagccgggtgcagtggcaggcgcctgtaatcccaactactcgggaggctgaaggagaattgcttgaacccaggtggcagcagttgcagtgagccaagatcacgccactgtactctagcctgggcaacagagtgagactgtctcaaaaaaagaaaaaaaaaatccctctcttcatcccacacctccctccagccaccatcctgtttccctgttctctacagcagagctcctgcaagcactgcctgctcgggctggctctacttcttgccaccgtcagcctgccatcctcctactcctctgaaatgactctttccaatctcaaagccagtggtcaacatcctggccttgtcttcctgacgttctcagcagctgtcatttgctcctaagccacgccccatgtttccagcttttgagctgcctgcttttcttcccagtccctggctcttcctcctctgtctcccgtgccctccccccggccccatcaccctgcagatgtcggggtgcctcgaaagcacagcactctatctctgcaaccccctcaggaatgtcatccaggcccaggattttaaacgctgcctctaagctgctgactctcacacttctccctccagcccagacctctccctggagcacagatggaacaccaacaggctcccgcacagccccgctgaagagccgaacggtgctcacacatgactcgcctgaagaatatggttgtgttttccccacattctaatccccaccgagcttcctccatctcagtaaataaaacaaccaccgtccagctgctcaggccaaaaccttaaaagacacccttgcttattcttcagtgcatctaaggtctgaccactgtcgccaacctcctctgctgccgccctcatccaagccactgtcatcgcttgtctggacaatgccactggctccccacctcgtctcccctgcctctactcgtccacgtttccctctccaccctgcaatccatctccaaccagcagtcacagtgaccattctcatgcatgacgagcaaccgcaccattccctggctctctcctgcagcttgtcgccgccagccccagaaaaacccaccatcactgacaaggtcctggagagcaggcttcagctcccagctcctccattaccacgtggtaccatctctgggcctctgcaccagctgtgatttctgcttggaagatgtggcttaccagagcccctagctctttagatggctatctctttctcatggttcagacctcaggacaaatgctacctcctcaagagatgctccttggtcactctggctatacaagcctccctagtccttctggaccatatactcatatttcttcctggaactggcactctcagaagctatttgatttatttgttcacattcatactttaccctctcctcattagaatataagctccgtgatggcaggactttaaatgtcttgttcacaattgtatttccagtgtcccaaaacccatttgacagatagtaggtgctcagtatttgttaactgatagttatgcaagaaatgtgaaaatctatcacctaagaggtatccatcctcaaaaccatcttagtgataagagtccaccaacctagagataaacaagaacaaacttgggaatggaaaagttgtagcacagaagtggcaagcctcatctccgcttaaacacacaacgaggactgggaccttttgaaattatgacttgagagctgaatataaatgctataacccttaacaaagaagaaatggccagtacttgaaggtggggtgggagatggtaaaaagtctaagtgcataaattcccttatttttcctaacaagaaactcatcagtaatttgaaaatgtgacatatacagttgaacaatacaactacgctacttcctcaggtttttcacaatcttttttcttcatcttaaagagacctgatagggaatcatatctctcgtcatgaataaacatatcagaagctcagcaattccataaacttcacttcgacttatttttttctctgatatgctaacgtaaaattaaattaatagttttatttaaaagagcaagtagagtacgatccacttttaggggaaataacttctccttcctgccagtctttctcagcacacgtaaatgcagaggacgggtctgtttgaaggtttctctaacattaataacgtcgatttctgggtagtaaggtttgggaagcctttttctctagacccttctgctgtgcttgtatttataaaaatgaaaatcatatttaagcaaactgcacttaaacaacaaacacagaaataaaaacaatagctccacctcatgatttagcaaaccaagctcccactgtgggctgtacaagtttctcctcgaagcccctcaatgcactgatggcctttttcttctctcccactgggcagcccgcttcaaaagcctcttcccccccgagtgttccccagaggcagcacctcatcctcttctatccgcacgaatgtctctatctttcagaggtcagaaatacactcatctgaagcccttgaggccaggtgtttttcagaactaagacttgctcgggttttagaaagaccatagggtatatacaccatggaccaggcagccccctgtaaccagatgcattaagtctgcagtcaaatcaataaatagtcctactacgtgaaataagggaagactttaaatggccccatacaaatttatgccaggtttcaccactaatgggcttggataccatcttcatgaaaagaaaagcctttctttggggagcttttcggattttggaatagcaggcagagggccatggagctgcctaagctgccttcctgcctgtctccccaagagacactgagctccataaagatgagaacctcgccttctttatcacagattcccagagccaagcagagggtctggcacacaggagaggtcccgcacttgatagatgagtaggctggtagaccttctgagtgtttgcttaaaaacataagggcaggcagctaggtgtggtggctcacacctgtaatcccaacactttgggaggccgaggcgggcatatcacgaggtgaggagatcaagaccatcctggccaacacggtaaaaccctgtctctactaaaaatataaaaaaagtagctgggtgtggcggtgcacgcctgtagtcccagctgctcgggaggctgaggcaggaaaatcacttgaacacgggaggtggaggatgcagtgagccgagttcacaccaccgcactccagcctggcgacagagcgagactctgtctcaaaaacaacaacaacacaacaacaacaaaaataagggcaggcaatgtctatgcaaattcaaatacaactgtgactatgttggtctcctctggctattataacatatgtaggttgacccggtttgaagtcatttgagtgtgtctgtatgaattcaggttctgcccataatatggaaatattcacaccaatatatacacacggaaacacactgttcacctggcaccagacactgcctcccgccccatgagcagctcccacagaagccctcctaccgcacgccacacctgctcagaccgagggctgagagaactcagctcttacgatgccccaggttcagagtgaaccctaagtggaaggcaagtttcatttcttcacctgacattaaacagcttatactcttaaaaaataacctattatcttagctccactggcgtattaccaagaaccaggtgactcatttccaggtcacccgggagaccagggggttggagctaatccataattccagatttcctggccacgccagctgcgtagaggtccgggccaggcccttagcacacttcatggctaaccctgaaaatcgccatcccccaccaagtgtacccatccctgctttcagaacaaagtacatgagcccatcccaggataaggagggtaaagagctgggcatctcattaatgcctggctccgatcttgagctcatagagcagccttgccttgcagcctggcttcccatgcagctgttcattgacagcggaggccaacaggctgacgtgatggacagaccatttctaggccatattaatgggctggcttctgggtgatacgtcttagctccagaagccggactggtgtgaccctgctcccagagactcgagcgctcccagtgctacaaaaattaaaagtcgcagtccaaaaggctgaggatcagcctcaaggactgacagaagactgcagagagagagacaacaaaccataattatataagaacaagtcataaaaggcaaaaccctgggtaagagatcacatcccttcttaatgaaagcagaggcacagtgagacgcaatagctcatctgaagccccacgactcggaggtggcagcctggccccatgcatgtcgctgcaggctctccgtctcctgccccctcatcctgcaccccctgagatatctgccttcctgtcaagggtccaacataccatgatggcctcagcaggcttcataaccctagggcctaataccagacctggctcacactaaatgctgaataaatgtgcaagaaagactggcaggaagatggatgggcgaggctgagttaataggaggggtctccgtttcatgctctgggaaagggcagccagggctttcagagtcccaagaactcctcccaagtttccagctgagcttgcttcaaggaaggacactttgaaaatgtctctacttcctaggcaccgcaatgttactaccaagggtatttcctgtggaaaccaggggttctctttggaagatgagggaaaacctcattataaagtcaaggatggagctaatatttggagaaataattaactgcagtgatctagataacagcagagatgaaagacagcaggaagtcagctgcggcaggggcaagaggggcctctgaagttggcttcaaagggttctgatctgctgtcccgcctgctgcgatgaagttacaaaaataacagagaattaaaaactgtcctcaacccaggactgctctacccagcagtctcctctcaactgtcggtgactccctactgcctggggacagaggccaaccccagcgtgctttcaagaccttctacagtggcgcccattccacctctgcagacccatctcccgccggccccacagcgacccttcgattcagccgcagaacgctgaccacccccagcccagacctctgctgtctcctcagtctagaaactcctccctcctcctgccggccagctccacttagccaatttccaagcactccaaaaaaaaaaaaaaaacaaaccttttttaccaaaatattgatggaagccaccattagttatgtactctactaataaaagacattatttaatctattcttcaacatttttttttactttaatttttctttttttttttttttgagacggagttttgctgttacccaggctagactacaagggcgcaatctcggctcactgcaacctccacctcccatgttcaagcaattctcctgcctcagcctcccaaatagctgagattacaggcgcccgatgccacgcgaggctaatttttgtagttttagtagagatggttttcaccatgttggccaggctggtcttgaactcctgaccttaagagattcacctgcctcagcctcccaaagtgctgggactacaggcatgagccaccacgcgcggccacagtgcatagagcatctaaaatatatatcattttgttttccaagtgagaaaaggaatcagagagactgagtaacttatccaagggcacacagctaatgagtccaggaatcaaaccacagactgactggcccctcaagcacttctctttccccatatcccaccccaataagaccaaaagttactactgcctacctctggtgacaaatggatgatggagagaaaacatctcactacgtgatcatctctgggtgctggaaatgatggtgactttttaagacatttctgtattttccatatttttgtatttgttttaaacatacagcataagggttaagagaatggaactcagattcagaaagaacttgattctaggctcagtcacttaggagttatgagggcttacaccctctaggctttattttcctaatttgttaaagggggataatccatttacttcaagattattatgaaatcaaattaggcagcatatataaagtacttagcacatggcctaatgcaagtatctgaatgaaaaaaaaaaaaagctttccagaatgtccccctgctcatcttcctcttgtcagcctacacataaaccatccccaaacactcaaaaatccttgccattggaagacctccaaaatctgggataaggacctttccctgtggcttttgttctagtagctaccaatacttcttgacagagattcatgttctctgcattccctggaggtgcatcctgtgcaggaagttgctacggggtccctgtgaggctggagttctactggtgttccttgcctagtcttgggaatagtggatgattcccagcagatggtgacctgaagaacaagctcttaaagtccaacaactattagaaacaaggcttcaggccagttgcggtggctcacacctgtaatcccaccattctgggaggccaaggcaggcagatcacttgaagtcaagagttcaagaccagcctggccaacatggtgaaccccatctctaccaaaaatataaaaaattagccaggcatgatggcgtgtgcctgtaatcccagctactcaggaggctgaggcagtagaattgcttgaactcaagaggcggagggtgcagtgagccaagatcgtgccactgcactccagcctgggcgagagagcacgacttcgtcttaaaaaaaaaaaaaaaaaagacttcagacagtaaactaaagtgtttaaagctggatagaatttagaggccaaacctgacccctcattgggcagagatgaaagctgagccctccagagacaaaggtgcctgcttgaggtcacctgacaatgactggcagggctagacttagaatcccaaccatggccacacacctaatttctttcacccttagtcatcctcatgactgttgctttctttccaaaactccccatggagtccacactgcatcgattatgaagtctaacgaagttccctccaggacataccagccagtccaggaagggttccatactgaccctccccaggtggcttcccttcccttgaagagctgaggaggtcatgagagcacacctagaccatctccactctgactaccaggcacattctgcccactcatcgcacctcaccctgtggactgactctctcaccaacacccaccactctgaacttagaattgccaaattctttggctggaggagacatggtggtcacttccaaatagcaacaggcaccgctcactgagaaacagctgcctgcagggaggtgcacccacagtatgcctcatcccaggagtacaaaagggtggtcatcttccattttgcagaagaaactcatgcttgggtttccagtaacatgtagacagcctgtgggtgtggcagcgtaggcaggcgcagatcgggctggctccgagagccacgcacggtcattccatacctcaaactcaatgtctccctcacacctcctgcccaccaccacccagaggctgccaaaggaaaggtcagaaaggggaaacgtcttgcctttggccaccctgttagccacagcactccatcgtgtatccaccatgtaacccaacacaactggtacctaccagtgacctgacagctactcggagaggcagcagagtagaggggagggaaggagagggaagtcctcaagaagagggcctcgtcctgtaagcattcatatctgacctagcactgggcacggtgccctggcaagcaagacatctatgccgcaacagaggcaagcctgcactctgggtccgaatcccagctccaccatttcccagcatgtaactctgggcagcttccttcattttctgggtctaagttccctcatctacaaaacaggaccaatagtcctacccgactggctttgtatcaagagcacagcacatgaggatgtatatcgcacctagtacatttatttcctcacctgcagtgggtactcaaaaatatggctgttgattaccagagtccatccataaatgttttattgaaatagtaaatgcataacccaagtctgattagaattggatttccagaagcccaatccagtggtcactctacaataacacagggtctcttctttccaaactccaaaccatggtgtgcctgccgtggccacacctgtcaggctacacaagcagcaaggaccccctgagacctgaacatcagatgtctggctggaggcttcagcaggtcttcaacgccatggccggcagttcctcaaagctaaagctggtgcgtgaatgagctgatcatgatgacagctttataacatgcacctgacagatggcacgttgacagtgaggggagcttctctgggctgggacagagaatggcaaatcaaccatcaccggagcaaggctcttccagcagagctgtgaggcactggttagaaagctgatgaccggctgtaatcttgaacagttacattaattaaaagctgcatctttatcaagcaacacttcccagggagagagaggagtgagaaacacgcaagtggagagggaggctgcaggaaggggacccgctccccagaagcccagcgtgaccttcaggcctccagacaggacccaaagaaaccctgctgccctttatgtgccatgaaaaatcaacccccaccaaagaaaaccactttctcacactcgtggagaaatacttgcaaaatgtattaaagggcgtgacgtgctagacacctgaaatgagccaagtagagggactgagaagagggtcttgggagagaggaaaattttcagtggggtgctcagcatcagccttgccttatggagaaggttctaattcagcaaagacctgaaagaggtgaggacttcagcctcatagataaccagggaggagcatttcaggaagagcggtgcctctccgaggtgcagacaacgcctgcgctccgggtttgaattctacctccaccacttcccagcatgtaaccctggacaacttccttcattttgggtctgctttccctcacctacaaagcaggaccaacggtactacctgcttggctctgtatcaagagtataccacgtgagggagggcgcacattccacctagtacatctcctcacttggagggggactcataaatatgactgctcattaccagagtccacccataagtgtttgaaataaggaatgcacaaaccaagcctccacaaagacaataaattagcagtgtgcccacatattctttcaatagctaaaatacacaggggctgagtgtcggagggaggagaggagacagggaggtaagtgggaggggataaggttatggagagcctttcaggccattgtaaaaacattagattttactctgagcagctagggagccactgcagagaaatgatatatttcacttagatgttaacaggatccctctggccacatgttgaaaacaaaacagactgcagacagaaaagctggaaacatggaacccagttaggaaattattgcaataatccaagtgagtgtgaatggtgacctgaatccgtgaaaagaaggtaagaagtagctgcttccaaatacattttagagatagagaaaccagaattcttgaggaataggtatgaagttgaacagaatggtaaagaatgactccaacgtatctggcttaagcaactggaaggaaaaagttgccatcaacaaagtcagggaaattgtaaagccggttggaagtaaattgtcagtcgcgttgagtgcaggatgactggaagacacccagtagagatactgggtaggtaagtggagaggagtggttggaattgagaaaatgcagaagctgccctcgtctgatactgacagccacgagcgtgcaggagaccaccgtgaggaagtgtggaaggagcagagaggaggactaggacagggacgtggactggacgtgagacattcctatgctgagaagtcaagaagaatgtgtcctcgcagctcctcctgcagcacctcacagtgcacaaccggctgggccagcccatccagcatagagatgtgaaaacctgtccaggtcgctggtgtatagccagaacaatggcacggggcagggcaaagatgctcacccaggtctcaggttgcaggtggagctgtgttgcagtcagaaggggagggacctcctctacccggctccaggtctggttctcgtgcactgctgcagcagtgctgtcgttgacaaagcaaagacacctgccctggtcctccgtgcagctggcacggagtcacagtcagcagaagaggaacacacacaccccatccccaccaggtcctgagtgcacagccgcaacagtaacacggtccacaggatgagacggctcacccgagtccgccatgcgcagccctgccactgtctgcagggtaaggacgcccacctgggttcttgtgccagccacagttgtgccacagtccgtagggtaaggactcccccagagtaaggactcccgcctgagtcctggctgcgcagcctgtgttgccagtcgcagggtaatacactcgcctgcatcgtgggtgccccgccaccgccctgccacagtctacaaggcaagaacgcccgtctgggtccgtagtgtgcagccgcagctgtgctgctgtccacaccataaaaactcctggccacagacgtgccacagtcggcaggataagaatgcccagctggatcttggggtgcacagccccagctgtgccgctgtccacagggtaagaacgcctgtctgggtgggtccttggtgcacaaccacaggcgcgctgcagtcggcagagtgaggagcctgcctgggtcctccatacgcagtcgcagctgtgccgctgctcccagggtcatgacgcctacccaggtccttagtgcgtggctacagacgtgccgcagtcctaccgggaaagatgccagctcatgtcctcaatgagcagctgcagaattgccgccgtctgaaggataaggatgcccaccaacatacgcagtcgcacccttgccgcagtccgcacagtaaagacgctcaccaggtcctccgcagccaaccgcagggtagtgtcacccaggtagctctcagtgccggcttcagcagcaccaggcaatccgcagggtaaggacgcctgccggggtcctccacagctatctgcagggtagggaacgctcagctaggtctcagtgcaggggattcagcagcgctgagatcagcggggtaaagagctcgcccgggtcatccgcagccatccacagcggagaacactcagcctagatctcagcgcgaggcttcagcattcctgcgatctccagagccacccagatcctccgcagcctaccacaggggaagacacccagctaggtctccgtgcgcggcttcagcagcggcgcaatccacagggtaaagagtccgcccaggtcctccgcaggcttccgcaggggaggacactcagctaggtcttcaagcgcggcttcagcagcaccaggcgatccgcaggctaaaaacgccccccagggttctccgctgccatccgcagggcaggaacacccggctaggtctctgtacagttcccgcagcaccaccttccacagtataatgacgcccgcccccgcagtataatgacgcccgcccgggttctccgcagccgtccactgggtggggacacccagttaggtctcagtgcatggcttcagcatccccgcgatgcacaaagtaacgacgcctcctccctcctctcatcctctgcagccgtccgcagaggacgacaccagctaggtctcagtgcgcagctgcggcattcctgctatgcacaaagtaatgacgcccacccaggtcctccgcagctgtccgcaggggaagacaccagctagatgtaagtgcgcagctgcagcaatcccgcgatccacaaagtaatgacgcccgcccagatcctccgcagccgtgcacaggggaggacacccaggtaggtctcagtgcgcagctacagcattcccgcgatccacaaagtaacaacgtccgcccagatcctccacagccgtgcacaggggaggacacccagctacgtctcagtgcggggctttagcagcgctaggccattcacagggtaaacacgcccaccggggttctccgtcgccaccgcagggtaagacactcagctaggtctcagtgcgcagctgcaggagtgccgcagtccgcagggtactgacgccctccgtgatcctgcgcagccttccgcaggggagacacccagctaggtctctgcgcagctgcaggagtgccgcagtccgcagggtactgacgctctcctgaatcttccgcagcgttctgcaagggagacacccagcgaggtctctgcgcaactgcagtagtgccgcaatccgcaggctactgacgccctccagagttctccgcagccttccgcaggggagacaggtctcagcgagcagctgcaggagtgccgcaatcctcagggtactgaagcccacccgggttctccacagccttccacaggggacgacgcacagctaggtctcagctgcttcagtatcccgggatccacaaagtaatgacgttcgcccagatcctccgcagccgtccgcagggaagacactcagctaggtctcagtgcgcagctgcaggagtgccgcagtctacagggtactgacccccgcccgggtcccccacagccttctgcaagggagacacccagctaggtctctgcacagctgcaggagtgccgcaatccacagggtactgacacccgcccgggtctctgcagccttccacagggtaggaacacccagctaggtctcagtgcgcggcttcagcatccccgtgacgcgcagggtactgatgcccacgctggtcctccgcagccttctccaggggaggacacccagctaggtctctgcgcagctgcaggagtgccacaatcctcagggtactgacgctcacccaggtcctccgcagccttccgcaggggagatacccagctaggtctcagcgcgcagcttcagcatccccgcgatccgcagagtattgacgcccacccgggtcctccgcagcctagagcaagggactgcggaacgagtgccgcaatcttcagggtattgacgcccacccgggtcctccgcagccaagagcaagggactgcggaaggagtgccgcaatcttcagggtattgacgcccacccgggtcctccgcagcctagagcagggaactgcggaaagagtgccacaatcctcagggtattgacgcccacccaagtcctccgcagccttccgcaggggagatacgcagctaggtctcagtgcgcagcttcagcatccctacaatccgcagggtactgatgcccaccaaggtcctccgcagccgtcagcagggtagcgacacccagccaggtctcagcgcatggcttcaggagtgcctcaattcacagggtactgacggtcacccaggtcttctactgctgtatgcagggtcgggacacccagctacgtctcggttcgcgacttcagccgcaacatgatccgcgtagtaaggacgcctgcccgcccaggtcttccatgtaccgctgcggctctggcgcagactgcagcgtaaacacccctggtcgtacgttcggccccgccctcagcccctcccttcctgggcaccattggggcctccttgttggcagggctgtgctcgcaccggatccgaagcggactctgcattcaggctcacgcgctctggaagggaagggcgctggagatgagggtggccgtgcgtctgcgagctgtgaagcctgtgtttgtgactgtaatctcactcacgggtgacagggccctgaggatgactccgtgtcctagactgcgggtattaacatggggcctcttccgtgcctttccgaggcgaaagcctgggtgggttcggaggcgtcagcgctaaaatcctataggctaagttacagggccttctcgctttattaactaaaggactagtaacagcctcagagcgctccctggaggactatatgtgacgtactaatttctaacaaaaagttgaaattaagaaattttcaccttttcatgtttttgtacatagagtgctatttgaaccatttatgttttcttatttgtccttcctcttctagccacaagccatcttttggccaggcagctttattccaaatcaaaatgagcatatctttttctttgagacggagtctcgctctgtcacccaggctggagtgcaatggtgccatcttggctaactccagcctctgcctcccagattcaagcgattctcctgcctcagcctcccaagtagctgaaactacaggtccacactacgatgcctaatttttgtatttttactagaaatgggatttcactatgttggccaggctggtcttgaactcttgacctcaggtgatccacccgcctctgcctcccagctagaattacaggcctgagccactgtgcctggccattaaaataagcattttaaaatacatttttaggtgctgatcacagagaaatatttgaaaattctggttactatgaacttgggttggttttgtagggttttcttttttttgttttttttttttttttttgagacgtagttttggtcttgtcacccaggctggagtgcaatggtgcaatctcggctcagtgcaacctccgcctcctgggttcaagcgattctcctgcctcagccacccaagtagctgggattacaggcatgcaccaccacatccagcaaatttttgtatttttagtagaaataaggtttcaccatgttggccaggctggtctcaaactcctgacctcgggtgatccacccacctcggcctcccaagctgggattacaggtgtgagccaccatgcccagcctggttttttgtttattttttgttttttcctttttttttttctttttggtaaattttgcatgaggaaaggaatgtcttcagagttgggaaaaatatttatttcatgatgttctggtatatcaatatttcagttgctatttagaatgtcttatcccagttaaatatcagattggctccagaaaatgcatattggagagtagtgtgctttttgttccatgtggttttatatgctgttttgttggtttgtatttgcctagttactagagtccaaactgtaacagaatgtagttaaaaccagtgattaatgtaacttatgatgctttgtaagagacaataaatgtggtatttggggttgttgctgtgattactagtgcaactcaaaattattgcttctctcaaagtttgtaacactctgtgttaactttaatttttaaaaatatgtctaatgtgttttcctgactacccaggtggaaatgaaagaaagagatgtaatagactcatgtgaatttaatggaaaatcttagcctgggtctcagagaaattgaaattcttatagatgtcttaagttggtatttggcacatagtgctagacaataaatatttgtccaataaataaaataccagcctccccccaccacacacacacacacacacacgcatgcacgcacacacacagacatagacatgggggagaagaagacatagtttaccatgttctctcccacacataacttcctcattggctggtcaacacacaactcttggtttggtttggtcctgcctagttcactgcttacttctgtctctatcttctgattagagtaggttgaagggaagacagaaggagaagagactgaagaagtgagcagagacaagtttttcaggaggccggcctgcaaaggccaacaagaatggcagtgtggactcggagtacacatggctgcctcttgcacatgatgctatcttgctgtatgattctgggcaaatactttcaagtcctgcctctcactctgttcacccccactgagcgaggggctgggcaggataaagctcaaccccccacatgcctgtggctcccattttgagggagttgcaaagctgagtgtctgaagcgccaggatcatgtctgacttacgaagatgaggcataatcctgagcaaacaagcacccagtgatgaaatgaagggatgctagaaagcaggaattccactagcagaaggagcatgaaagacctgccgctccccactcccacagcacagacgagaggaccgagggatgggaggtaacaacagagggttagcagtagggtttcctcatactcagcctgagacaccctccttaattacatcagcgctctcttccagaccctcgatgacaattgtttacgagcttccctttttcagaagcatttttagtgcagcattatcggggcaaatatttacctccctgtgcctcagtttcctcatctgtaaaccaggactagtaataggacccacctcggagaattgtgaagattaaatgacagagctcacgtgaggcagcgcctctcatcaggggcaattctgtccccaaccccacccacaggggagctttggcaatatctggttgacatcctggttggtacaagcgattggggcaggaagggaccctactggcctccagtgggttgaagtgagggatgctcctaaacatcctatatcctgtagccccctccaaccgcaaagaattatctagaaaaaatgtcatagtgctgctgttgaaaagtcctgatgtgaaatcttagaatagtgcctagaatctaataagtagcaatgaagaatagttgataccatattactaatgataccttcatgactacaaagcactctccttagccatgacgctatctcagctggtcttcacaatgaccctctgagatacacacgactattctttttacagatgaaggtactaagaggttctaagacaaaatgtgacttgccaagagttacccagctaagaagaaacaggatcaggtcttgaacctgggcagcccaactcctgtgttctttccatcactccaccctcccacctgggagagagagacagtgtataccaccagctgattcctgagcaacagaaatacgcgtttttgagcatatcaatgaagatatctgaataatttattggcatgcatctctaaatccagacgctggaccatccctttgcttcctatgtttattcattcactcagcagttacttagcacttatcctgggtaccaagcattgtaccatatgccaggctggagatgcagggatgaaactgtctcctgggagggcagatctgtaaacaaagaatgacagtagaatacatgtgctacactgtatgccagggctgtcggctgtaagcatagagctatggagccagatgaaagacctctgcaacagcctgaacggaaccaggagggctccccgctctgcaatgggtcttgaagaacgaggcattttctaggaagatcaatgaagaaagatgttctcgggagggagaaatatgaggcaacatggaatatcatcaggaataaagatgactgagaccctgcgatctctgagatactcacaggcccgtgcgatagttggatatctaagtgggcactcatgatcttagacaaataatatgcaagtagtatgatggcacgatggggggagctgtgaactagctagggaaacagatgaaagaggccaagtttctcccgatattttcagccacagtctgaaatgcagcagctctgaggcagggagatgacaacgcaggcggcaggaatgctgcgtcacacacaggtgctgtaaaaagctacgacacacaccctcctgggggtgccattcccccagcccaggcaccaggcccggaccagctgtagttacccagctaacagaagaacggttcacaccgacaaggtacttcttaaacatccttcttgtgattaggacatttcccagagttgcctcgaactgaagccttacttcctctttctaacccttttagaaacagtgttaatggcgacatttaacgacatggagctccctgagttgactctgcctccgcttgccccctgggcctgtcatccatgctgcatcgtggcagggtcccactcagcagcagccctgactgcgtggctcctgggacagcccaaacgtactcagccaccacttggccggctccagccacctgcccccaggactgaaggttatgcagatacacagacctggtccatcctcttctaccctcccccaggtctcccctttccaaccccagctcataaagtcctaggttcctgtttcttactgtgattagcagcatatcattgtcattagtggcctcacccagaggcctcatgtcaagggaaatggcgactgtgctcaaatagtggttgacgcataataaatggtctataaatatatggcaaattgatggatgaattggtaatttattctgaacagtcagcacttctcttgagacttcggctaacactgttgaatctgtctccccctggttatccagtttgattccctgggctggtcggatggttccttcctggccacagtacagtgcctttcttcctggaactactgggcctccttattgtcaagagagaaaaaaataactatacttcataaagacacctgcttaggagagaaagcagagcgccatgtgtataaaccctcctgacgtgccctatcttttcacgcttccctccctttgagcaccctgtggacctttctggaatgagctccatctatgcttctcttacccacctggtaaacacctcgtctcctcctagatctagcagtacctcctctgtgaagcctttcctcagctccttctccctgccctctttatgtctcctctgggacactttctttttgtctttaatcgcatcttcattacctaactcaccctgtggggggaggctccaggaaggagagagactgcatgcagtctgaatctcagaacaccagagggtctgtcctcagtgacagagggccagcgggcagcactaccaggctggccactccttcataggagaccttgtgtggcagaagggtctgtctctcatctttccttaaaagcagaaaggacgagaacgagcaatcaaaggtccaagcctatccaaagagctaaatcaccaagtcaaatgtggattttgtaatgatgaactaaaaaaaaaaaaaaaaagtctggtgctcagatcaaaaagcaacaccaatgacaaagtgcgggatgatgaatcacacagggctcagctcaaccttcagaacaaaggcaaggtcagtgttgccaggacgaaagcctctccgcctgcttcctcattcagcacctgaacaacagccatcagatcgtgccatcagagcagaggccccgggtcccaaagaatcaacaccaggttcgcatttttgtgtcagacagtcgttcacagaaaagccagaaaagttgctgacaggtacctaggtaactgatttcgactgaagatcaaaaagaatttcccaactgtcagttatcccaaaactagacaagatgcctgagaggggattgccagttcctaggcaagttcacacaacatcagtcactgaggaatgcaggtcaagccaggccttgccaagatgcccgcagggtgagtggatgtcacggcctatggggctgctgggatggtcattcaaagcaactacacatggagggagcagactgtgaacaccagctgtgttcttggtcgtgggggagcgagggggcagtgaggtaggacagggaaacacaagctttggagcaagagaaacagactgcaagtcttttactgaccagctgggtgaccttgaaaaggccatttcacctctgagactcaaattcttcccacgaaaaaaagaggataatgccgacctcaaacgtattgttacaagaacgaagcaagatagcctatataaagggcttgaacagtgccaagctccacagagatactcagaaacacagatccctttcctgtttttctccttgagtagtactgatctttacatccctggcaattagcaaagtgcctggcacataatacagtcttaataaacatttgcaaacgtttacatttcagtggtgcctctgttcaagataggagttcggatcctgagctccatgagcgccagaagtctaagaacctccagacatagagaggagattttgcgtgtgtgtcctttcttttgagggaatgatccatggctttaaattggagattcaaagaagtccttggccaaaaatacagcaaggaccaccatactacaggcattgaaaccaccaccaggagcatatccttcttctcctcccttctactctgctttcaagtcctggttcaattcaaatcccctcctctgaagtctcagagcacttactgtctgtacaaggtcttagtaattatgaaatctcagatccacaggaaggtagaaatggaaggctttttacggtcattcctttgtttattcgcttactaagtattcagttcagctcctccagtgcaccaggcatggtgctttatgctaagaccagaacatcaagtaaaatggaacagtccccaccctcaagacaactgcaacaaagataaaactaagtaactggagaactgtcattgtaagagaaccgaaggatgctatgaaaggggcatgtagccaagccgtccagaattggaggcaaatggtaccgtgggagtggccctcagttccagcaatgcctctcagaagtgacacctgagaatggaggaggagaaagccagtgcaagggagaagaggaatggtgcctcaggcagtaggtaagcatggccaaggcttacaggcgaaggcatggaaatcatttccttgtggccaggccacaagacagccatgagaagagctgaggcaagactggccaagggtatgggctttattgtaagggagatgggaaggcatgcatggcgcactctgactgggggtcacggaggcagcacagagactcaatctgtgcagggcagagaggagtgaaacatttaagtctggcagtttccatcttgcccacaatttaggctaggaagagcaagtatgaggctccaggttttcaaaatgtgtgtggtgggggtggggtgtagggggatgagacagacagacacgcacacatatatgcatgtagatatgaggatacgtgtgtttatacatagacaggttatcctctgggtgatatccgaactcacaattcactgattcataatctgtggaggatgaatggagaaggggtgggggcggggagttaagaatttcccagtacagtcctctgtttccaaataaggagactgagtcctagagaaggtaaatagccaactacataattatcaaacaagtctcttagttatttggaaaaccagaatcagaagccaaactgcagatgcccagccctgcacccacagccactaggggcacagcccttcatcacgtatcttagatacctggcagcctctcagagtggatgggcaacacttgctcaattctgatgagctagtttggtctttcatccctaacctagtcacacagaagctctgcacaattcccagcatagtccctgacacagagaaggcgtttaaagccaagtgtccatttgactttacagcattttggtagcacaaagctcccgctcgccccccttgcccagggcgcacctggccccgacatctacgcctaccctcacaggcctcccaggtgtgtatgaccaggaagataagttgaaaggatgaagcctgtttgaagggtggttgtcagactccccgaccttagaagagcatctttctgatggtgttttttgttgggtttgttctctgttgtgtcccagtgcctagaagcacacgtggtatgcagaaggccctcagcaagtatgcagggaattaactggccagatgttcctcatgacccgtgtagttaatatttggcttcagtcagagcagcgtgacatttatctgttatgtatttgggggatctgtgaaggtttcacttgaagcaacatcctatgactaagaatagattgaaaaccactatccagaggggagatattttttcttttccttagtttcgagaagcctttttacttactgaaaaacagtgcaatataaatggagtttccaaaaaccaaaacagaggtaatttataactacccaaaatactttacttttcctttccgattctgaaacaaatgtgattccaaaatgcctctaggtacatgtttggattttataaaaattatataatgaaagtgatgcctcacaagcaaagggaaggcgaggtcgacacaagcctctcgccatccgtgggccgagcacagagacaaatggaggcccccctacctgctgagcaccaggacaacccaagtgattccaggacattctgagatggggagggggcactaataataattactccagggcagtatgaacagggcctgtctcagacaaactggggcatagggcactctggtaataaccagcaggaggtcattaaatgcaaggtcaccactggtcaaaatggatgattatcatctaggagggtcaagtcctagcaaaatatgattgccactcaaaaatacgaagagaaaacagaccatgtggtacagtgaaactaacatatctgggtctaaattccaggcctgccatttactagctgcatgaccttgaaaaaaatactatacaatttacccctcagggttaaggattaaataagaaaaaaatatatatgagtgtaatctactgcaccttactgtattcaggggttgtgggtatagtgagaagcagctaagggtcaatggtgccttcccattccaccctgtcaaaaactggggaatatggggcaagttattgaacctctcaaaaaattcctttcctcatttgccaaccaataacctctcccacctgaaagcatcaaaacagaaggcagacacagcccagtgttttaccctgggccacgcaggccagcctgcctgtttcctggtctgatgaacactgaggaaggtcaacagaggctggggagactgggctttgaagccttgtaaaaattaattacacttaaatccttcatgctgaacatgctctgtatgctcctcctgatttgcttataccctctgctgtgttccaagagacagactcaggtgacagcatcaacaggctccgcatgcccctgagcttctggccaggctcagcccacgggaggccccagatgagacagtggagagtagggccgcagtggttgctcccctgaccctagactgccaggctctgctctgctctgctctgctcttcccaaagagcccagctgccctctggcagcagctcccccatgcaccccctgtggtagctccccctacagcagctccccctgtagcagctcccccctgcaccccctgcagcagctccccacatgctccccctgcagcagctccccctacagcagctccctcctgcagcagctccctcctgcagcagctccctcctgcagcagctccctgctgcaccccctgcatcccccgtggtacctccccctacagcagctccccccatgctccccctacagcagctccctcctgcagcagctccctcctgcagcagctccctcctgcagcagctccctgctgcaccccctgcatcccccgtggtacctccccctacagcagctccccacatgctccccctacagcagctccctcctgcagcagctccctcctgcagcagctccctcctgcagcagctccctgctgcaccccctgcatcccccgtggtacctccccctacagcagctccccccatgctccccctgcagcagctccccctgcaccccctgcagcagctccccctgaaccccctgtagcagctccccttatgctccccctacagtagctccccctgaagcagctccccctgcacccccggtagcagctccccctgtagcagcccccccctgcagcagctccccctgcaacccctgtagcagctccccccgcaccccctgtagcagctccccccatactccccctgcagcagctcccccctgcaccccctgcagcagctcccccaaagctccccctgcagtagctcccccctgcagcccctgcagcagctccccacttgtttgggtaactgcttcctcttgtccttctacctggagggtccaaagtccccagctgctgatagccccaggctgcttcccatgcctcctgggtttcccttcaccacccaggtccttggaaagtcccctttattcaactgtccccagttacccctctgagtgtgctgcctgtttcctgtggggaccctgactgatacatccattaaaagcccctttctttttcagttactcctcagtttgggccttaaacctggcacatgctgaccagattccctgaggctcaggtgaggtcagctcctcctaccaggcaaactcagaggtcattaccttcaagacacccatccagactcttctccacctgcctctgcccaggctggcctcaacaccttggccgccagctccatgagcaccctaaccccatgctgtgctccttggtcacttactgttgctgcctctggaacatggtggggggaagcaggagcacagagaacaatgtacatcccccactcccagccccttccctaacagcacctggaacgaggtgggcactcagcgacagctgcactgatgcccgtgagcagagcaagacgcccagagcaggtctccctaagatacaaacctgagtgcatatgctcacatttctcagggatgagagtcatgcattcattaaaagagtcccaatgtgtgtatgaggacaacatagaactttccttcaaaatggaggtaaagcagaaaggaaagacactgacagcaggatttgcgactcgctgttaagaacaaggcaagatactttgtcctgaaaaagtgatcggtgtgatagattaacatacagaaaacagtgggcagataaaactccttaaaatatttatggcttttgagtgattctgaaaagaggcaagctctccctgtatgcgccagcacactccatcaacagggacattttaataaggtgactcctgcaggaggctcaggcgcaggcgccatggcaggacttggtggtatgtttcataaaatattcacagctttctccagaaaagaacatctttgggtagcccttctccttcatcaacttggccactttcataaacagaggaggaataataatactgacatgtcaacgggaagctttggctcgccttgccttgggcacgaggagagtaatggagaattccagacgatggtgcgacaggtgcaaggagagtaatggagaattccagacgatggtgggacaggtgggaggagagtaatggagaattccagacgatggtgggacaggtgcgaggagagtaatggagaattccagatgatggtgggacaggtgcgaggagagtaatgaagaattccagacgatggtgggacaggtgcgaggagaggaatggagaattccagacgatggtgggacaggtgtgaggagagtaatggagaattccagacgatggtgggacaggtgcgaggagagtaatggagaattccagacgatggtggacaggtgtgagaagagtaatggagaattccagataatgtcagagctcccgaccagtaagcctccatttcatgtcaggcaccaggctggacgctggagatgcatgatttttcatcctctcaagagatctatgaactgtccccatctttacagaagaaactgcaggtcagagccggtgggttcgtcattatctcctagtctcataacatcctgtcagatagaatggccacattcacaggtggagacattctgcttagaggccccttttaataggtggccttgcagatcatgagctgcaattcaaacccaggtctgtctggtttgggtttgcatcatgctatatcctagacatatcactattttttaatttcctttttttttttttttttgaaatggagtctcgctctgtcacccagtctgaagtgcagtggcgcaaactcaggtcactgcaacctccgcctcctggttcaagggattctcctacctcagcctcctgagtagctgggactacaggcatgagccactgcagccagcctaaattcctcttttcttgacatcaaaaaaaaattcttccacataatttttcctttgcttacttatatatgagagagcagttgggaatttcaggggttggaaatatgtctagtattatgtggggagcagagagattggtgaagaaagtaaagagcacaggcccagcagtgacttatgtcctgtgaagtttcgacaaatagaacatagtcccctggacagagggtgcttcatttcagggagattgacacaagcagcgccatcccaggcagcatgtgctgcatcatggggaggctgaagcccgctctcaaactcatagcggcagggacggtatttccagcaggaccatcaggaaagtgtccagaagcaggcagcacacagaaggtgggcctttgagaatgaaatgacacagatgtttgccatcacttaccatggcaggatgaactgttttaaaacagcaaaaatgtcgggtggtgatttctatgtcaaggatggggagagagaccaccctttcccggcttcagggttgcaggagcaggcacctgcctggccactcactgctcagagggagtcctgggcgtggagaagtcagggaggagacgccaggcagactcagcggggaccctccactgtgaacctgggctctgcctgtccgtaggaagcaacttccacttcctacgccccaagtcacaaagaggcaggttcctcaagttttgggggataagttcaagtccagggagtctccgcaagcccatgtgagtagaactgatccaccgaattcttcactgccaacttgatgactggtgcacatacagttttcacctcccaacctttaattggccctcaactcaaaagaccctctacatgtccacattagagtccctgacacaatcaaagcctgtgaagctgcacccacgcttcccactcgatcggaaagtcaggcctgctcatctgcggaacttctggctcatttatgtaagagctgcctcgaagtctctgatcagaattgactgcttccataatccctccctaagcccttcctttgagtgaggtggcctcttgcatacttcaacagcacccagtatgcacctccagtagcatagctggtagctggtctgagttcctcacaaaactcactctgcttccgagcggggactgttattcctgtttccaatcccctcacctaaactaacacctccaggtcagaaggctgtccttacatttgaggagtaaatggaacaccacccccaggccatatatccagcgagtcagtcaacaatgaatgtctctatgtgcctagtgatgggttcataaggacgaaaaggactgaagaaaaaaaaaaaaaaaaaaacctcacaaaagaaaatattcctaacagcaactgctgacgttgcaaaagacacatggtactttaggcccatgtagtccaaagtagaaatctgatatcataatgtcattaatttgactgttctcttcgacaaaaatttgaattaagcttgatcagaaagatgacattaatgtagccatccttggcacctgatggtaaaatctttaatcccagcacaggaaggtatcataataggaccatccgtcaccgatgcaatcatttgataattgcttttaggccctgggtccttacatccaagacttaaagacaaagaaggaggaaagaggtgaagtgcctgtgattaggagagcaaatatgtggcacgtgaggaggaagcatatgggagcgggagggagaaccgcaaagcctcctcggaaacagaaaaagtttctgtgagaggaaggaagtgaaaggagccaagagacaagaggagggagggaactgtcgatgatccggaatatgtgagtaataacataggactcaatgaaaaagatgcaatatccacggaataatacattcaattaagttcagtcaggagtctgactacctcctgagagctgggtctgtgctagaccatggaaggagagagaagaataaagcaggacacttcctgactgaaggaagcccacaatgtaagcaaagtaaaactgcaggtaataaatgacaacagagtgtgctaattgaagcaataaaaagtgcagccatggggaattggctccaggaaccccacagacaccgaaatccttgattctcgaattctggtataaaatggcacagtatttgcatgtctacttacccacatcctcccatgtaatttaaatcaggtctaggttacttacaacctaatacaatgtaagtgctttgtaaacagttgttataatggttttttttttttttttagatggagtcttgctctgtcgcccaggctggagtgcagtggcgtgatctaggctcactgcaacctctgcctcccaggttcaagcaactctctgcctcagcctccagaggagctgggattacaggttcctgacaccacacctggcgaatttttttgtatttttagtagagacggggtttcaccgtcttgaccaggctggtcttgaactcctgacctcatgatccaccagccttggcctcccaaagtgctgggattacaggcatgagccaccgcacctggccattatactctatttttttggttgtattatttttttttctccaaatattttcaatctatggttgcctgaatctaaggatgtggaaccggcagatgcagtaaggcccagctgtagagtgaatgcacagagcaggggctggataatcacctgggacaagcagcctggcgaaggggagagcatacagcctttggaaccagatttgggcttaaaggcttgttccacacttacgggctacgggtcactgaggatgctgtgcccggggcccttgttctccttccaagggccagtaatagtcaccctccaagggacggtgtgatgagcgaatgtgacagtgctcgtgaacacctataagaccacctggcgcacaacaggtgcggattatgattattactgggggaaggaaagactgcatagaaggcagtgcctgagcacaaatcagaaggagctcacgagcataaaaggtgaggaaggctgttcccagcagagggggcagcaggcacctggcaaagaggtgtgacaaagaacagtgagcccagcaactgcacgcaggatatgaggggtcaggggagaggcaggggcagggtgtgtgtctgtctgatgggcgaagggggtaaattttttattcttaaggcaatgaggaataacgaaaaggtttaaagtagggtgagatgtgatcgtaccagcattatagaaagatcatgctggcagctatctggaagctggacagggtttattttgcacctgttaaaagagtccatggccaactttcggaggcaggaaattcatacctaaaagtaacgattatcactcccctagaggcaccaattctacatgtgacatgttctctccttgtgaaatttcagaggaatccagttaagcagccaactaagcactcattttcttcctttgagagaaggtaagacttgtacagaacctgagggaagatgatgagtcatttgtttggcattgccgttattttattgatgctgatgcctgtaatttacaaattttaggggaccattttaaagagtcacatatatctctctagcactaaaattgattcatgatgctattgtgttttaaagacaataaatgcttgctgtggttttgagaagtaaccccaggcgctgcccacgtctggggtacacacttctggcagcagcggacaagctagagagaagagatctatggtttctcagtccaaaggtaccgtagaggttccctacaggtggggcagcagcgacggtggggctgaataggcggagttcagtgagtaggcggagttcagtaagtaggcggagttcagtgagtaggcggagttcagtgagtaggcggagttcagtaagtaggcggagttcagtgagtaggcggagttcagtgagtaggcggagttcaggctctcccacaccaaccacccagatacagccagagcatccggccacaggctggatccacacgaacaggaggaggagatgtcctctcacctgaagttctaacaccgccccattctgacccttgagccagtggggtactgtgggaagagaagggtctctggagtctgagagtcttactgacttaactgtgcacaccattttgacacactaagactcagtttctccatctgtaaagtggagataatatgttctttgtagactggtgtaaggataaaaatgagatgatacatgcaaagtgctcaccacacagtagtcatgtcttagtctattttgtgctggtgtaatagaatacctaagactgggtaatttataaggaaacaacaataaggtaatttataaggagcaactggctcacagttctggaggctgggaagtccaagatcaaggctttagcaggtgatgagagcctggtttctctgcttgcaagatagtaccttgcatactacatcctctggagaaggacacgctggttcctcacatgacagtaagacagaagggccaagagagcccactccccaaagctcttttatgaaagcattatgcccactcacaagagcggagccctcatgccctaatcacctcttaaaggtcccatctcttaacattattatactggcaattaaatctcaacgtgagttttggagagaacaaacattcaaaccatagcaagacatatgatggcagcttttatttagtgctgagcagtgaaaaaaataaacataggaagtgagtgagcctctaacatgctgcgtaacagaactcactgagcagcaaaagtaagcttgatgtttttttctcttaaagagaatttggaaaataaattctgattcatcactacagttacaagatacaacatcaaatgcacattgtctagaaaataaaaaatagatttatctcaagctaaagagcttcaaagaccaacagtgcatttgtaatttacctctcatgactgaactataccatttacctgcaaccactaggaatttgaagtcataactgtgtaactaatttagagcttacaaagtccatacaaatatattttctcatttacacctcataaactctatgagatggtcactattaatcccatttaaatcagaaaccaagatttgctccaggcaaagctccatgagatgcacgtgggtggcgctttgataccgaggagcaagaccccagtgggtacagcacccacagaacagaccagccgcctggaatgggaaccagacaggaagttcaagtaagtccagctagaacaaagcaactactgcaacacacactttacccccagaatataggtagcgcctgccattacaggtgattagcaaatgtttaatgaatgaacgtctaccatttcaactgttatggccttcaagaggctccagagattccgttagtagtcaaaggattctgtaatgtctgagtatcttagtggacaccctgtgaagtctctttctagcccacaatggtctccttctttgggaactgtcatctgtgcacaggaaaggcctctgatagccatgtctgtcactaaggggctcagggcccactggccccaggtggcaggagcagagaaggacacgtaatagaagctgggccaagaagatgcctccacctgcgggtctggagttggtgctgagagaatcctatcagggctgtaggtttcacctgtcatgatgtgaactgggggctgagacagctatgggtgaggggaatgggtttgaagcagcagaggagccagtgagtagaaaaagacaaaggaaggacaagaagccacagagcaagtgacagcacttgagcgacagtacacactggtgcagaaagcctggcaggctggttctgaggactctccagcccgggtcccacctgcggcctggccctgcagtgtgtcctggcttcctgtgagtcaccaagcttcccctaggacagtccctctttggcttaagacagtgtgaaggtgattttgttaactaccgtcaagggtcttcatttaaacaggccccttccaaatgcagtctaatgtcaggccaaggccatctgaaatgtaagcatctgcaggagacccaggtaggcacaacagtgtcacagcaagataaggcaaggagaaaagaggagcagaaagccggagtgcacagcaggagaagaggacaaaaaggcagccagccaaaccacgccaggcgtggcgtcctgcagccagcaagcacacggggctgtcatctggaatgagttcaggaaactcaggctaattttagccatagcctaagaaaactgtgatcaggatgatgaattggctaaacaaaaatgttatgcatgataaggcaaaacagaagtcctttcaggatggcccctcaagcagttcctcccaaccccctttcccgcaagtccccaccacgccgccagcaccactgaccaggggcatcctcactccacgcctcaccccgtgagttttggagaaactcaccccgcaagtttctggctgtaaagtgctttcttcttcatgtacaactcccagccaccctctaagggcttccacaacctaatgaagatgaatgtaatcccttaaggcatttccataacctattaagtaattagaccgtcacatatacacacttgagtacatagtaacattcccatctttggggttaaaaactgaggtaagaagaggtcacgcaatattttcagagtggctcagctgagaaataaaccagggaatttaaccaggtctttaactccaaattattctacctcataccatggggtctctcaaatgtcaccttctctattaaaaccttcaaagttcctctaaaccagaaaggaaccccccttcctctcacctgggctcctgtagaactgtttgtgggcttctcaaagtatttccctccatctccctctaacctacttccttctatacacatctcagtacccttggcaagactgaattccttgcttcctagtcccattcagattccaggatgccacagtttcacataatgggtggtcagtagatgttgagaaagtgaatgaagataaactgacatagcacatcctttaggatttatttcttaaggtgaacccctgggtgtttggcatgtatgtgttcagcactggtctaggcactgtgacagataagaggtgacacagccccagccttgagttagataacgtataccatgcatccacaagatagaaattaaggcagctttgaactccaacagaaaataccttcagctcaaagtatggtgtaatttcttttccttatttaccagaaaaataaacagagccagcaccaagctgaaatgatgaatgaggcgggtgctcttccagcacctctcctcagcaactggaaggagagatcgttagcatttccctgattagcaagctgagttaattaatacaatatagagtgcttctcccaggaaggaattttaaatagattttgtttttaagattttcacttccatacagcttttctgcaatactctcatccatctagcctccatctatccatccaacaaccattcatccatctatccaacatccatccatccatccaacatccatccatccattcatccatccatccatcatccaacatccatccatccgtccaacatccaacatccatccatccatccattcatccatccacccatccatccaacatccatccatccatccatccaacatccatccaacaaccgtccatccatccatccaacatccatccatccattcattcatccatccaacatccatccattcattcatccatccaacatccatccatccattcatccatctaacatccatccatccatccatcatccatccatccatccatccaacattcatccatccattcatccaacatctatacattcattcattcatccatccatccattcaacagccatccatccaacatcatccattcaaccatccatccaccctttcaatcaagatgtgaggggcatatgccatcaacaaatactgtggaagtttctgagaatacagaggtgaaattttttaagggtcaaggaacaaaacccaatcactaggcaagatgttgggttctctaagagctctctatcaactttccctcaggatatcagggatgcctccactgaggagtaaccctgaaagaaaagtaggaattcactaagccacatatttatgtgggaaatttaagtgaggaaggggatgaaaggagatttttagggagagaacacagtgggtgcaaaggcctgagacagaacagtgtgatcagaacatccatgggcctgggtgttgttggaccttgagatgcaagagggacagtgttaagggtcagggttggagaagcaagaaaggaaaagacgatggagaacttggtttatctaaggagtttgagttttatttcagagccatggggaaatcacagtcagattgtcacttaagatactctggcagtaaggaagaggcaggaaggccagggcagaaagtgctgcagtgacccaggggagaagtggtgcaggcctgtggcagggcccaggcagcagcagcaacagaagccccagagaggacagagtggattcagagagatgacctagattttcctgccaatgttataattataggcacactgtgaagtcattaccaaaggcaaaattgcatgtctatcctattgtaaactcaactataggccctttgatgaaaaatcagtggcttccacttcaccatcacttattaaagggctcctctggagagctctgtgctccttccagtaggggtgaaagtgataaatacagcagagtcgtgtgtctgtagggcaggctcttaaaggggtcccatgatccctaccctctggtgttcatactactatgtgatcctctccccttgagggtgtgggtgggtcctgtgacttgcttaaagcagaggtggtaggacctatgtgattactcatctatgattacattacatgagactgtaggctcatgttgctggagtccatctctttctttctttctttctctctctctctctctctctctctctccctttctccctccctctctccctcctacactgtctttgaggatgcaaacagtcatgctgggaaacttcaatgagtcaaggatctgcaggtggcctctagatgctgaggtgcattcttcagccaacagccagctagaaaccaaagctctcactcctatgactacaaataactgaattccaccaacaactgaagggagcttagaaacagatccaaccccagttgggcctcagatgagactgcagctctggccaacaccttgacttcagccttgtcagactctaagcagcttgtctgacccagctgagccatgcctggactcctgacccatagaaactgtgtgctaattaatatatgttgttctaggccactacatttgtgacaagttgttagaaagcaatagataactattgcatatagtaggagtgaacaaaagtcttagatccagttcagtgcctatatctgctatttattacctctgtgacttgggttaagagacaaaagctttctaagccttagttttccctttctaagagaaataatgcctacatcctgatgtttctgtgagaattaaatttttttaagtgtatatctaagtccaacacaaagaactcaatgcctcttctgtacctcaaagactgggtaatgagtagggagcggcagagaggaacaaagctgcctcaggtgtctgaggaggggatccatgctgcaaggcaagtgtgcagcacagatgggaggcaggtgactcagccatgaggctcaggaagcctctctcgagaaggggcacctgagcccatcttgaagggccccgatgattttgtgaggctggggtcagaaacatgggatccacagccatcccgagcacgaggttattcacagtttgcatagacttaatgtttgctggatgtgcacatcgaaaagtgctactgggtcctatacatttttatttttatttaatgtgttgagcaagatgcacccacacagctgccaatctgacatctctgtttggatgtcacacagatacctcaaattactgcctctgcaaccacatttcttacttacccctttaaatctgatcctcttccaggcttccccatctcagtaaccggccacaccatccaccttgttgctggtcactgtccccgacccctcttcagagcccttcccacagtcacgtccgccatgacaccccactctcacccaagctcacaagtgctccagccggacctcccactgccacgcttgcatcttgcacacattctcccaagtggatctgtttttaagtgaaattgcacatttcactttcctgctgaaaaacccttccctggcacctgctgcctcttgctcaaatgcagacctcagacccctgcacgtgcatggccttgcagaacccagacttgccagctctggactggtcacatctgctctccctgccctgccctcacagcccggccacacccactctgccatgggcatctggggtactgacatactgcttcctctccagccacgagccccaccccaactgcacagctgggttcttctcaccccactgcaccttatttattccatcatgccccatgtacttctcgcacatcactcatcaaaaattatagttgcatagtcttctgttgcttatttattttctgtcttcccaggaaaactataagctccacaagagtaagaacaatcggtgtctgtttgttactgatagtatactaggggccaaacagtgcctggccatcaaaggacactgcaaagtatctgatgaatgaatggaagtcttgagttctttgtgaggagtgcaggtgaaatgggtccatcaggagaggctaggttatgctgtggtaacaagcagcctccaaatctcagtggcttacaaccaaggttcatttcttcactggacaggctctggtccatgtctgtctcactctggaccctggctgaagcagcaagtgtccccaccaggactttgctcaccttatgctggaggcaaaagaaagatggccatagcccccagctggttatttaaacttctgctcagcagtttacatgtgcccctgtattaggttcctattgctgttatgacaaatgatcacatatttagtggcttaaaacaacacaaactgataatctcccagttctagaggtcagaagcctgcacaccagcatgtctccagggctgcgttcctggggtagggtgcagggggggctctgcctgagccccttccagtttctggaggctgcctgctctccctggctgtggccccttgctgcattgccccagcctctggcttccatagtcacagcccctacccctctctctgcccagccctacctccctcttggaaggaccctggtgatgacactgggcccatctggatgatccaggatcgcctccccttctcaaggtccttaacttcatcacatcagcaaagtccctttggctacgtcaggtcacatgtacacaaggtctgacacacaaggtctgagcatcgggacgtggacatctttgggcgggggggcattactgcatctaccatgtgccccggccattcacaggggccaaagcaaatcacaaacccaagcctgacaccacgcaggcagggaagcacagcccctcacaggaagaccctcagaggggaagaccctcgcgggggaggaccctccgaggggaggaccaaaatcactctcgaagtctgaaggcagtgaggtgggggtataatctcccacagggagggcagcatatacctggcagtaatcagagaatctgccatagtaggggtgatcaatgggagaaaagagacttatttggctctaggaaatattaatacgtagtttcatattttgtagagcttaaaaagaagacctttgggtttcaatgttgccatttctggaaagaaagccccataccctgaaggcaagttcttgataaaaattgcagggtgtcactgtcccccaaccaggtggcctcagataaaacccggacactgctcttcacattcttcaaagagagatggcaacatcccctgcccacctcctcacggggctgcgaggggaagtgaggcaagggacagtagcaggagctgggccgatggtgatgcagcagccgaggtcagcaggcagaggcccacccagagctcgggggcgggacacggcctccctaagggcctcaaaggtaactggcccaggggcactcggagggaaccaccaagctgggttgtttctgggaaagatcactctggaaataggggaggcaccgaaaggagtgctgctcagcagacggctgcggtgacccaggaagcatcgacgagaacctagtcactgacacagagcaggggcacgcagaccacggggtcaactcaggtttatgaggtcattgctaactggcatggaactctggaaagcgcgtcatctgtcatttcagaaagcatggcagtgtctgtccgggaatggcagcaaggggaaggtgtgcaggggacctgtgggtgacgggaacattctaggtcttaggcatgttcatttatcgaatctcattctttttttttttttttttttttttttgagatggagcctcgctctgtcacccaggctggagtgcagtggcgcgatctcggctcaccacaagctccacctcccgggttcatgccattctcctgcctcagcctcctgagtagctgggattacaggtgcgtgccaccacacccagctaatttttttgtactttagtgagacgggttcatgtccagatccttgtttgttccaaacctgcatgtttgagagaaacaacgattagacatctcctttgagccaagtgccacgctaaatgcctttttgcacttgaccatctttaatttccagagcccattgagaggagggtttctctctcttggtttgaaagtgaagaagtggtgttaatttcaccgtgttagccaggatagtctcgatctcttgactttgtgatccgccagcctcggcctcccaaagtgctgggattacaggcatgagccacagcaccaagcctgtcaaatctcattctttacacaattcaaatgagggcattttgcggtacgtaacttcttccttagtaaagttgatttgaaagagattgtcaagcagactcggaggaaaccagatgaggggcaaagctgctcttagctcttctcctggctctccaatgcggggtatccactgagatggccagggagggagaggaccaggctggaagaggagacacggtgggccccatctggagcatcttaaccgtgagacactagacagaggaaaacgacaggtccatttcagaaccagactctcaggcaccaggttccaaacaaagacgttaacgaatcagccccccagtcccatgtcaaggagttctctcaaggaacgtcggtggaagggaattcgaacaccccgtcacgagaagttcatcagacactcgtaagaacatcatatttgatagcgataaaagctctgagatagggtccaatttcgtctgcagttgaatacaagcagcacaatgatcctgaaattaaatgacatcatctgtcacaacagcagctttctaatttgaattacagcactgtggaattttaaatgaaaaagaaacatttaattaggacagtgtatttagccagagcataagtagcgagaagtagctcagtctggctaactttaccaaatctcatctccaggccccacaaaggcagagatgtggaagggaagccttgaaatcctgcagggtgggcctagcgtggcaggtgtgggggcagggagtggactcacgggcgctgtgaccctcagtatttggacgacactgaacacatcactaattgtgcgttcgcagcttcatggcacaccactgacagccatgagctctcatcctcacccgatcctttcccagatggggctgggtgatagacgaggcagagaagagctgggtctggaactggagtctacctttctccagcagccatgtctgggcatctctaacgtatgtatctggagacaccgcttcttcactttcaaaccaagagacagaaaccctcctctcaatgggctctggaaattaagatggtcaagtgcaaaaaggcatttagcatggcacttggctcaaaggagatgtctaatcgttgtttctctcaaacatgcaggtttggaacaaacaaggatctggatagaagctctgtgaggcatgcaccaagcctacctgcgtgatggacaggggctcaggacatatttatccactgactgaacaaatgaatggatgaatgaacagaatcatgaacatacacaaccaactatgttagagtaggaagaaacagaattaaatttatttttggtgattttaatcatacatcataccctataaaacgcattatcatacagctctcttcaatcagatgctaagcatcttgaggacagtggccatgcttcatccatgaccctatcccagcagtaaggttggtacctggcatggagcaggccctcaggaaatatccacggagctaaagaaacaagtatctcttggcctccttgatttagaatcatgttaaggatgcagggttttttataaaccacagatttcactgataacaaaaatacatattccagaaataatttcattttatcaacaaacattaaaggagatacgttcttgattgcaaaggcattcccatcacaggaaatagctaccatatccaaaagcattgctcctatacagaaactagcatgagactaaaaccatgacactaaaagtctcagtttacaaatttgtgttgctctaccagcttctttcttgccaaaaatgagtccccaagaatataagagctaaagtgagtttactagattaacctgaagtcataaattctaaagcataaattcacctgtattaagaaagtgtaagcagtgtggtggcttttgcagggtgagttataaaccaacagagatagcatctacttgccttactaaaatgattcatggtgaagagctaaattggcttttcagccaaaaacaaagacagcacagacaatggcatatacaaaagttagaatttacaattgtgttaatttgtttttatcaataccaaaggcaacaaatgtttatcttactttcctgtggctctttagttgcagcctaattcagatcaccatagaacagttccatcacaattatgctcggtggtgagacagcccaagtgtggtttcatttactttggagcaaagaaaaaaagaaaaatacacaaacacacacacacaagttttcatggaaaccagctccagctctggcgtaagcaagccatccatgggagatggctggtgctcacagagagaccacagtgggtcaccctgtgcccagccagaatggaggctgcatacaagaagcagtgactaatggtctgaggttaatgagcggctaaaggccaagggtggggacaaaggctagggtataaactgtgtccaatttttccaaaaaagtctgggtgaggcaaattcattctctttgagagaagtgaaggcaggaaactggcactaattgaatacccactgtgctccttgtacggcagatcctcaaaatgatcccgtggggtggggattatcagtgctacacttttcaagagaaaactgggactcccaaggggtcggcatgatttcgccagtaaatggcggagccgagatggggagccagctctgtccagctgcaaaaccactgctctttccacctagccattctgcctcagttacaccctcctggcgatgggtcagtcctaggaaaaggcctgcacatgggagatcttaaagctgcttcctttcgaaagcagacaacttcacagtcattcaagctccccattaagactcctctcacatatttaacaaacctgcacgttgtgcacatgtacccgagaacttaaactataataaaatatatatatatatacatatatatatatatattaaaaaaaaaaagaagactcctctcctacagatctgctgctctgccaatgaggttgattttcatggggattttcagttagcagaagcaaagtccttctttctaagcgtccagtcacctctaaagcatatgctaattccctacttaaatctgtttctttaacaacagattggtgtccatctcctttctgaacaaggcaggcctgaggttcctgggtgaggcagggcaggcaggtatccgtgaggaggggaggctggctcgggtgtgtctggccccttgcaaggtgaggcggcaccgactgaggaggatgcccaggggagagtcgaagccccaagaggatgaagtggacatccgtgtgtgagacctcagggcctgagcagggtacggggtcctagaggtggagcccaaacaggccatgtgaagagcccaagtagggagaagaagcgatcccagggaggggcaagctggcccagggcatcggagccaaggaggggtctaaagggtgtctacacacggggtgagccggcacgggggatggaacccgagctgcgtgggcaggatgtccacacagggggcagggggcagtagaggcgatgggagactgggtacacacaggaggattgaacacctaagtcagcaatggaaggatggtgagagccagctttctccccgagagaaaaggaagttatggtgagagccagctttctccccaagagaaaagggagttacaaacacagagagagaaaattaaaataaagccagtgataccggatcggaattggagggatctctgagaactcatgttttgcgatgtatagagatggatagacgaatagaaatgtaaatgcacgtgtacgcatgcacacgcacatacatacatgacctattcactgagagggcctgaaagcagtggcatccgaatcagctacatgcacacttcaggccccaactgtggcttcggaggaatcagggcccctggagagatgactgattgcagggctggagcagggaaaggacaacgttagcctggagcatctcacgccagaaagcaaggaagaactcaaagagtgatgcccacgtgtcagaaggacacaggcagcttgaggggcgcccactggtcaagtctgaggcaatctgggtatcaaaataaagaactggagtggatcatcaccattaaacagaatgagactgtgaattcatagtgctgtgaagaaagggatgcacagaccggaaggctgataaagaacaggatctttacatcactttacagcaccttcgtagaaatgcttccaaatttcagagtaacttcacagtggagaggccgggcagacaccaccttactcaagtgatcattgtgacactgtcagaactgggatgaaccacctgataggtacgatgggaacatggcatcattctgtagtattcctgtccaaattacagaacctgactcttgtcatgaggtagcatcaaagccaacttgaggggcatcctccgaaataactgaattataatcttgaaaaatatcaaggtcatgaacattaaagaaagcctgaggaatgctccagatcacagactgaggctaaaagaatcagatgattctaagtgggaccccttcatctaaaagccactcctgggacagctggcaaatgtgaacagggtctgaggaccggatggccatctccttattttgatggttatgctgtggggtacagagaatgctgtgtgttgtttggaaacacacaggaaagtgcttgggggtgacagggcatcgggttaacagctcagcggactgagggggttctttgtactatgcttcaatcttctgtaagtatgggattgcgtcaaaatttttaaaaatcacacagaaaaattgccaagcacaataaatgttcagtgtaaaacatttaggaaataggacagaaaattaaaataatctattattctcatcactgaggtaactgtcattaattccatacgcagacttccaatgcttttgcgatgaatagatttttaataagctgaaattatactgtaaagatattttaaaagggtacttttaaaactttctcagtggctacattttattccattgtaaaggtgttcaattattcaattaaccaatcctctattatttcaaatttagattgtttccaatttctcctttgtgataaagaacactgcaatacacatcagtatgcacgtcaggttttgttctttagggtatatcagtaaaagtggaatcactgggtaatagggtacagacttcttcaaggttcttgatacataaaggactgccacatttccctgcagaaacattacactaaactatactacacaactgtattgagagtatctgctaaaaagtgctttgaattttaacacgatcaccatctgtccagtgttagctgcttataaggctttctcatagacatagttcatctggcccctgcaacagccccctgaggaagaaaagagatgagcacgaacctccaactacatccagagaatgccaggctcagaggctcagtgatgcgccaggcctcctggctgccaaggggtgcggctctgtggtggaaactgcacaccgcttctcctagacggccccgtcctagacaaccctgccaccgaaaaatgaagcactgactttttctcccctcagggttcaaacccaagacctgttctttcacaaagaaccttgagggaacaaaggcttgagggcgagtcgcctggtggtcctctccatccagacaatccagggctcccagacaactcctcactcacacacattcagtaacatctcaccgacttcaaggtttagcaaaaagtccaccaaagctcttcctaatctggcctaaagcttacagttggctccagcctcacatcctagaagggtttggagtcagccctcttcccaggggaccgaggggaccgctgtccctgcaccttactggatgcagcatgaactttcacagtcggccccccaatgaggacatctctcaccccttcagccacagaattccagcttgccctgaaggccacgtagtccctgctctccggatcctccctggtcacacctctgctgtcaccttccatgctatgccaagacagccatccccaatcaagaccctgttgcctggaaactaaataggggtagtgactgatggggactttctcatctctgcacccagggtccagcacagcacagtcctccgtccaaaggctgcagaagttggtgcctccaaaacaacgtgctccttggactttccctttgtaagaagtgtttatactcagaagaggaaaaggccattaaaaaggggccgaaaccacgtaagacttcatttctaatcttgacacccacgggtctttttatttgccagaggcgtttgtaaaacagcatgattttctctcatattattttattatcacccaaacctcagcctcagtagattgccatcatcttccctgtttccactgtgagtcactgagaaatgagattagggctttactttcaccactgcagcttcactccatcaagcccaccaacgcagagcttgacacaaacacagaacaaacagcagtccccacgcagacggcggggcctcctaatccctccaacaagcactcaccaagtgaaccgaaaagaccttagccctggagacctcggtctagtgggcaagagagataggacacaagacaatgacaagacgctgatgaggacagggtcatgcagaatgcctgggaaaggtgcaagtgggaggctcagaataaccttccaagaggaggccaagtcggaggaggaggaggaggaaacaggaaaggggagaaatccttgatggtggacacagcagcaagtgctaaggcttggcagcacgcaagagaggccatgggcacccaaggaactacaagtgggatgggtcatctgaaacctccctaccaggaagtcaaggactagatggcttcactagaaaatctgacccaacatttaaagaattaaaaccaaaccttgttaaactctcaaaaaatataagaggaaggaatgcttctaaacacattctgtaaggccagcagcatcaccctgaaacaagatcaagccaaagacatcagaagaaaagaggaaagctaccagtcttcctgatggataccgatgcaaaaccctcaataaaatactaggaagccaaactgaacagtaaactaaaaggactatgtaccatgaccaagggggatttattcctagaacgtaaggatagttcaacattttttaaaaatcaatgtgatgtaccatattaatataatggaaaagatccacatgatcatctctcctgatgcaggaaaaatattgacaaaattcaacatcctttcacgataaaacataaaaatccaaccagcaaaacagaaacagaagggaactcctcaacatgataaagggtatctatgaaaaacccacagctaacatcatactcaacagagaaagactgaaagcttcccctaagatcaggaacaggacagcatgcctgctttccccactgctattcaatcccgaatcagagtcttcctcagagcaattaaacaacaaaaagaaataaaaggcatccaaattagaaaggaagaagtaaaactctctgtattcacaggtgacatgagcctacattagaaaatctcaaagaacacacaagaaagctactagagctaataaattcaggtaagttgcaagatacaaattcagcacacaaaaatctgttgtatttctacacaccagcaatgaataatctgaaaagaaaatttagaaagcaattccatttaaaatagtatatggaataatacctaggaataaatttaaccaaagaggtaaaagacttgtacactacaaattacaaaacattgcttgaaaaaaaaaaggatgacctaaataaatggcagacatcccacgttcatggatactagatttattattgttaagatgccaatactacccaaaacaaagattcaactcaatccctttcaaaattccaacagcttattttttcagaaatggaaaaaatgaccctcaatttctcacagaattgcaaaaggaccccaaatagcaaaaacaatattgaaaaaaagaacaaagttagaggactcacatgtcctgatttcaaaagtatctacaaagccacggtaatacaaacattgtggttctgacataataatagacacacagaccaagagaataagattgagagtcaagaaataaactcatacttctatagccaattgattgtcttcttttttttttcttttccggggcagagtcttgctctgtcacccaggctagaatgctgtggtgtgatcttgactcactgcaacctccgcctcctgagttcaagcgattctcctgcctcagcctcccgagtagtgggattacaggtgcttgtcaccgtgcccagctaatttttgtgtttttagtagagacggggtttcaccatgtcagccaggctggtctcgaactcctgaccttgtgatccacccatctcagcctcccaaagtgctgggattacatggttggccagccaatcgattttcaacaaaggtgtcaagtttatgcaatgaggaaataatagtctcttcaccaaatattactggtacaactggagttccacatgcaaaggaatgaagttgacccctacctcaccccatatatataaattaactcaaacagtatcagtttcctaaatgtaaggggtaaaaccataaaactttcagaagaaaaacaaataaatcttcatgacctagacttgtcaataacacaagcaaatgaagaaacaaaacagatatattggacttgatcaaaatttcaaactttggtgaatcaaaggatattatcaagaaaataaaaagatagtctacagaacgggagaaaatatttgcaaatcatgtatctgataagggtttaatattcagaatgtctaaagaactcccacaactcaatgacaaaaaataacccatattaaaaatgggcaaaggccttagatagatttttcttcaaagaagatataaaaatggccaataagcacatgaaaaaatactgaacattactagtcatcaaggaaatgcaaatcaaaagcacgatgagataacacttcccacctagtagcatggcagtaattagagaaacagaaaataacaagtgctggggggatgtcgagaaattgaaacccttgtgcattgctagtgggagtgaaaatggtgcaaccaatgtggaaacttttggtagttcctccaaaaactaagcatagaatcctcgtaagtcatagaaactccactcccagatgtatacctcagggattcaaacatataatttatcccaatactcatagcagcattagtcacaatagccaaaaggcaaaagcaaaccaagcataaacggataaacaaaatgtgctatatatacacaatggaatattattcagccataaagggaaggaaattttgacatatgccacaacatgaatgaactttaacaacattataccaggtgaaataagccaggcacaaaaggacaaatactgtataattccacatactgaatcatctagaataggcaaatccatagagacagaaagtagattagaggttaccaggtgctaggagtatggaagaacgaggaattattgcttcgtggatacagagcttctatttggggtgatggaaaacttctggaagtggtggcaagagttgcataacatggtgaatgcagttaatgccactggcttgcacatgtgaaaatggttgaaattacatacaaatgtcgcaatacaattttttaaaagagagaacaaaaccaggtagcagtcgctgtgctctgagttaagaagcagtggttggttcagggattgctgctataaggtggtgggagcctggctttccttctatatagaaaagcgtaacagagtcagctctgtgttttagaaagatgcatcatgatgataaaacaaaagtgacaaattactaaactccaatcaggaaaagatgaaattacaaattaccacatcacagtggggcatggggagaaaaaaaggaaatggatttctctctccattttcacatctgttatgtttccagtgatttggagagggaggtaggtacattccccacgccctgcaaaggcttaaaaaaaaaatagacaagggcagtggtggcttagggaccagtgggcagaggagagggctgtgggaaggacctggtatggatatttcaggttccactggaaaaagcaaagccacacaaaaccaggtgaccatcaggggatccgggtgtgacctccctgaagcagcaggagcccacacaggaggacaggggcacgaggcccggctgcctggcaggcacaagcaggacaaactccccgctcagagcctgttgtctgagtgccatcttcatggggccttactgagcacatacatgcatttacttctcggtacctacccatgggcaaggaacagtgtgacactagaagtacagaaatgagtcacaaactctaatcttgtcctccaggaacttaaaacctagggcagtctggctgggcacggtggctcacacctgtaatcccagcactttgggaggccgaggctggtggatcacctgaggtcaggagttcaagaccagcctggccaatacggtgaaaccttatctctactaaaaatacaaaaagtagctgggcgtgatcgtgagtgcctgtaatcccagcaacaggggaggctgacgcaggagaatcacttgaaccagggaggcaaaagttgcctaggctgatgggacagtgggagatccaggctgtgccacaccctgggtacagcccgagcggacagggtgcccaagtcagagggacaggaccagagacatgagctgaccaagggtgctgaggaaggcctgattccaaagcaggaagcatgtgctttgcagacttcccacctaattaagagaatttaaacccaaggttgaaggaggagggacaaaaatgcccaactaagctgcaggactggacaggacagaaatgacaagatacccaaagcatggtggagcaggagagggcaaaagcctctcaggaaaaagcggggagaggggaaaggaagggccagcacccacagggctcgggcaatgcacacccaccatggcctgacaattttaacttgaaacagggccacaattggcaaatagacaaagccatgcagtatgccaggagggctcaccgcatcccctcactcaagtcttcctgggagtcggtgctcctcactgggctgccagcgactccaaagcagagaccacatgctccagtgaccaccttggccccacacctggcactcaaggaggtctgcgtaattagtaagtgctggatctcatcatagagatgactgtccaagatcactcatcatagagatgagtgtccaaagtgctgtccaaagtccagatcactctggagcgggtagtgagctttccacggcagataacatggtggcgagcacgtcctgggtgcctaccgcagaccggccctgggcggcctcaccccacgctgcccactcactgtgacggtcggggtcaagccactgcggcaggatctcccacaccagccccaccccgcacctgctgaatcaggttttacattttaactagacgttccaccaatggtttacattttctttaaaatctgagatgcatctgattcacgcttcagtatttcgtttacaatcctacgtagtagatattcacagctctatcttatatatgaaacactgaggtttggggatatcatgaattttgtccaagtaacgaggttagcatttaaatccatgtatgtttactttgtaaaccataaccatatacgattataatttttcaataagtaaaaccaaatccaggtatgtttgattctgaaatttgtgcacataagcatatcatgtgttattagcaaatctccatgagatattggcataatacgtgccaatattactgtcatcttattaaagcaataattaaaatagcagctgaccgggtgcactggctcacgcctgtaatcccaacacttggggaggcagagatgggtgaatcacttaaggtcaggagtttgagatcagcctgaccaacatggtgaaaccccatctctgctaaaaatacaaaaattagccaggcacggtgggcaaacacctgtaatctcagctactcaggaggctaaagcagaagaatcacttgaatctgggaggcggaggttgcagtgagccaagattgcaccactgcactccagcctgggcgacagagtgagaccccaatctcataaataaataaataaatgtaaaaataaaatagcaactaatcctggagtgtactaaactatgtgttaggcactgtgtgtatgtttaacacacaatctctctctgggctccgggtttgttaagaaggggctcgggagaggtaaaaaggatgccccacgtcctaaaggccctttctaaagtagcgtctttgccagttctgttctctctcagtgtgatgtgctctcactgcatcccccggtccctctatgtgcttgctggaatttatggtaattttcagttctggcctgactgatcccagaaggtgagaccagcttctgtctctgggttgatgcttccctgtatggggacaggagctcagaacagtaagcgcattctgccttgtccactcgcagtataaaccagcagagatacacaatagcaggaatgcatctgctgtgctcggccttcagaagagggaaacaagtggtaagcaaacaaacaggttggtgccggtattttttctcttaaaaagataaacaaaatggggggattggtgtcagatacacggcagcatggtcaaccctgatctagggagtggccaatgtctgcagcctggggcagtgacccaggtgtgcagtctgagggtgcagagggctgaaccatcacagaaaaccggctgtgctcggtcagagtcagagactcaatgacatcctaatgctcagcgaattgggagtaggccacgcacgatacctggaagctctgaggtttaggcacagaagtccacatcacacccattctagaaagaacagccaactaaggatttagaagtgaaggatggcacaggtaagggatccttgaagtcaagagtccaatgggcacagaaggctgagggggacagcaagtcagggaatggtgggttcctgccactcctgttcccactgccgggagcctgtcccatccctggcctggcacattcctatccctactttacggcctgctcagattttgtgaaaccctcctcaaaaccctccctgggagagttaggtcctcctcccaccttgtatccctttcaccttgactacacggtgctcacaggaatgttctcataaagagagacacagaatttccgatccagcatttcacacgggggttatacccaacagaacgatgtgaatacgtgcaccaaaaagacacagacgaaaacatccatccagcatccttatataacagcgccaaatgggaaataacccaaaggcccatcaacagcagaatgaatccactgtggtgtattatacaggggaatacggtagtccagtgaaaaatgtgtaaactactgccacatacaaaaacataacattgaggaaaagccagatacaaaaaaaaagtactcatcgtacaaagccatttatgtgaagttcaaaacaggcaaaataacctatggtattaggtttgggacagctgctaccctggggaggaacggacagtgaatgggcaggggcaccgcaggaggccctccgagagctgctgatgtcgcatttctcattctgagaggtggttatctaacagcgttcaaaagcccgcagttttgccagggtagtcagtatttcgttatgctgtatgtcaccttatgatgtgtgcatttttctgagtttatgctttaattcaataaaaagttcattcttaaacaaacagctaccatttactgagggagtggaatatgttcattatgaataacaacgaccacacccagtgaaggcaggaccacaacggggtgcttgtgtgcagtgagtggcaaacagctgtgtgtcccacgagggcaagtgcaggggtgagcacacgcaggggcagggaaccagtcaagggcttcttggaagtagcccttactcatcccatagtctttgatgaaccactcattgaatcaggagcggctctctcctttgtcttagaattcagacatcccagctcccagtggcagccctttggcttccttaaaccactccttcgcatgtttataaattacatttaacttgttcagataggctattcattccagagatgcatgtcctccgattaagtgagaagttctaaagagcaagaaacttctgttttcctactggtgttgtgtggtggtgggtttttcggtgggtttttttgtttttgttttggcctggatatttaataccttgctttccccagtatgcttggtgttatctggcattgaacaagagcatcgaagtgtctcttctatacatcaatcagcgaatgaaacaattcaacaaagcatcctcccatacagtgatttagagagaacaattgtatgcacttcagaattccacccataaatccctcatgtcccactgcctttctgcctcccagatcttgccacattacccacatagctatcttcgtaaagcaaagttggaccaagtcagttcttccctccgaaacctgcagtgactcctcagtaagtagtcattcctcagtaaggtgctcttggccttcagtggtcaagcgccatgttatctttccaggctcaacttccactagatccctccagagatttatttctgctacaatcaccaccccaatgggctgcacggtcagttttcccctcagccagtcacttctctactactttccctcgcaatactaatcatagttaatcccgaggagatgtccaaatggcagcttttcaacatttctacagagcacttctactgtctttttataataattattttgttcttcatgctaacatacttaactataagcaacttgtgggcaggagaaccaaccacatttctaacatggcattcctcatgggagagttcattaaaagcatggggaattcgtaagtctacttattagactatagttgtcctcccttttcccctgttcacttcccatggtttcagctgcccgtggtcaaccgtggttcaaaaatattaagtggagaatagcggaaataaacaatttgtaagttttggattgagtgccttctgagtagcatgatgaatctctcaccgccctgctctctccctcctgggaccagcatccgcccttatctggcgcatccacactgtagacactctcgacccatcagtcacttaggagctgccttggttatcagatttttttaaaacccagtacacataaggttcagtactatccacagtttcaggcatctgctgggggtcttggaacacacacccccaaggataagaggggacgactgtatgtctctgttctgtttgttttgaacccactgacccatgagtccttctagataaatcaggactgcaccatgccctaaaggatgccagtttcacagcttgttgtagtggtgctctagttaacaaatgaatattcataaagagatactttgatttttaaaatcaataagttgctaaatgagagaaatcatatgcagtgaagcaggaacaacagatcttaagggactggttagtccatattcaaaatcaaaagatgacttcagcaccccggcgggcggcagtggctacctagctacctttactgttatatatgttaagggcagggggaaccttgaccaatattaattagtagtgctgcccactcatttgtccagtttattcactgttgaaacataaaatgcactccattttggtttccgtttcagagtacatttatgcattcaaatgctgctgagcaccctgggggaacaaagcacagggctgatagactcttccaaggcaaaagggttaatggtaaccatggcaactgcctccaagaatagcatcatctgcagcagcattcatgctggggcagtcgacagaatggttataaatatacctattagcagcctgagctgaatctttaaacagcactgttgggaggaaaggtgcctaaaaatagctccccacgcttgcatttgaagacatgtcctcagacacacggcatctcgtgcacacattcgcacacgcacagaaagatttttcattttcttttttctccaagtgccaagaattgaacattagaggcacacaatagacaatgtgacatctgatgaccttcctctttcattgccagattccaaaaagcacctccaaaacagaaagggcagccatgtgctggtccagatgcaacagtaggctggtgtgggccggcaccgcagcagccccggtgtccacatggcagtgtggccctggcaggctccatgtgccctgctcactgggaaggctgctcctgcagtggcctcacattggagacaacaggctggactgaatagctgctcccagcaaggaggtggctgattcccaccctcacagccctgccaggttgacagcccacttcttccatgcagtcttctcctatttcccccacttttacactccagggacatcttacccacatttctcataaaagatgggttattttccacataggatcagggtgcttgaagctagacagttgcaggttttaatttcagcttagccacgttattagtttactggcctaaataaattagcctctccaaaccttcatttcttcatttgtaaagaggcataatgaaatgccaaatgtagagagctgctataaggaataaatcacagagtaaaagaaaaatgcctcgcacctggtagtgtccaacttgtgagttttcttcctcttctcactcactcttctactcagatacattaaaaccctctggaaagcagggaccatatcacccaaactacatatccaagtagcacagcacccaggataaaagcagctgttagtggagtgagtgaatgagtggctggagctccacagtgagctctgggacacaaatatagaaaggaacaggacagagaataaaggcagctgagacagtgtgctggttagcatgcgtttccctgattagtatttgtaagaacattatcaaaaatagttcatctccaggtggtgtacaggcatccatcaatcaaagcacagctgggcagaagtctgggcatggtcatgccaggggccctggcagcatgatctgtgccctgctcattcaggcttcagctgcactgcccacttccctgactccctttcactgatctatcagtgggactcactcttatagtctacataccagtcctctgatggctatatgtcagtcacgtctcctccccttttggaaattctctaacttttcttcgtttgggatatttcatatatacagaaaaatgcgtaacacatgtaacttgcatgtaaattttgctcataatgtccttcttagaagtttgtaaacatttaatagaatcaaactgatcaatcttttccttcctggtttgtgctttatctgccaagcttaagaaactctttcctaccccatggtctttaagacaggctcctacattatcttctaaaattttaaacatgtttgtcattcatacctgtgtatttatcctaccgggtgctgattttgttagtggcatttcaaattttttcatatgcataaccaaatgtcccagcatcttttatgaaaagttctgattttcttccactgatttataatgcccccatgccattccatattccatcaattctaaaattcttatcagaaggttttcataaaactatgtatggtctgccatctggctgacaacaattataaaactccagagattgtaagatgaatctgtacttcaagaataaaacaaagatgcttcctagaattactgacatagtgcatatcaaacttctctatacctataaatctgatttggggctttctattctctttcatttgtctatttgtcaaataaataatctgtataagactattttaattactattgctttataagccttaatatctaataggccaagaccccttaacttggccacatccttcagtttatcttggctattcttggctccttcttctagtatatgaattctaacatttacttctcaagttgatttttaaattcctgttggaattttgccaggagttatgtgcaattcatcaatagagagtaagttgacatcttcaaaatattgagtcttctaatccatgaatatggtatattttgctatttcatcaggtctacatttacattttgtatgtttattgtttcttaatattcttcataaagtcttgtacacgtcatgaggttcttttcaaggtacctcagggtactgttggctaatgaatgagactatttttcttttcattcattcattcattcattcattcattcattcattcatttagatggagtctcactcttttgcccaggctggagtgcagcagtgcaatctcagctcactgcaacctccatctctcaggttcaagcgattctcctgcctcagcctcctgagtagctgggattacaggcacctgccaccacacccagctaacttgtattttaagtagagacggggtttcaccatgttggtcaggctggtctcaaactcctgacctcaggtgatccacctgcttcagcctcccaaagtgctgggattacaggtgtgagccaccgcacccagctttaattgtatttttctaactggtttttatggatctagatgaatgttactaatttatgttgaatagaggaaacctgttgaactctttctctgtcttttttttttctgagatggagtctcattctgtctcccaggcaggaatgcagtggcgcgatctctgctcactgcaacctctgcctcacgggttcatgtgattctcctgcctcaggggcctcccaagtacctgagattacaggcgtgtgccgtcacacccagctaatttttgtattttagtagagacagggtttcaccattttggccaggctggtctcaaactcctgacctcaggtgatccgcccacctcagcctcccaaagtgctgggattacaggcataagccactgcgcccagcctctttctctaattctaacagtttatccatagattgtcttgaattttccatactgacaatcctctcatctacaaataaggacagtattgtttcttccattctaattaatatacctctttttccctattgcagtagctagaactgagaaattccaagcagaagcattgatggcagacgtccttgtcttgttcaagactttaaaagcaatgtgcctagagtttcaacattaagtatgtttcctagagatttttgacagacatcctttattaagccaataatgctctcttgcagtctgttttaaaagagctgttattataaataaatggtgaactttactgaattattctgtaacaatttaaattattttttcctcaatcaatctgctactatatatgtaacactgggaaatgttctgctgtagaaccatctttgcacctctgagataaactctacttgtttctgacatagtttattttatctcgggcagatttcgatttgctaatatttcacttagtttttttggggggtttttgtttttgtttttgtttttttttagtatgctaaaatcctagtcactggtgaactttttggaccaagaacctagctaactgtttcatactggattttatttccatttcatgaaacgtttacctcactttttaactcagaggtattttttattttcttccttcacatgttttctgttactgcctaagtctttttgctggcaaggacaaatcaaagcctgaccttacttagctatcttggttagaattcaaggccaattccttttcaataattccatcctcaacatctctcctgttttcatactttcacctaaactcagtacttattaccttacatgggacagtgtatattaaaggtcctagtaaaatacctggaatataatagtgattcaatccaattaacaaactgatatatgttcaataaactagtcaaattttcaaaatcaacttttttcaaggacaaagaatttggaaatgttatatatctaaggaatttatgaggctatatctaataaattcttcaccagatactcaattcttctacatgctggactttctaaatatcttctctgcctggttcagaaatgcattacatgccactgcacatgcaggaggcagctgtgggggccaccccggcatggatgccagtggccacagcagacacctatctgcccactcagaataggttccaagtcgcatttggccaggaactaaatcccacactcaaccttgaggagaatttgtcagtgggaaccatgcgtgctgggtgtggggagggtggtatatgcatgtgattgtgtgcatatacacattttttctaattcaacttctatttcagccactttatgtatctccattttttaaaaaaaacagcatgaaccttggaaaccacatctactttaaaagacttttcttaactatgacattttgtaattaatttgaattttaaattttcctttaaaactgtgacctccaccttaatgagatggctcttgcctgagtctctcatcttcctatgcctctaatatttcataatgaatgtaactcataagcttcttacagtgtcccatgggccaggctgtgaaactacttgctctgtcattttataaactctataaccttgggcaagttacttaatatctatgagcctcagttttctaaccaaaaaaaaaaaaaaaggcagggaaaagagcacttattttccaatatgattttaataactaaatgtgaaaaagtatgtgaaagtacctgttacccacgcactcaataaagattcatttccttctgtcaacatttctattcaaactattggcttggtgcaaaagtaactgcagtttttgccactaaaagtagcagcatcttcttttctttctacattattgcctcctctcattttccagtttcatattttactctaccctacaacattgaacagccaaatacccactttgttgttcctgccttttcctggttttcttagactatttctgccttcttagaacgcacacgttagcgtgaaccaatgcaggaaatccaggaaagcctaagtgctgccattggcaagaacctctttcgatgtctggatctctcctctgggtcaaccctaatgccatgaatctctaagatagatttaagtgaattcctttgttgagtgagggcagcacaaacgctcctagcacacaggcagaacttcacaactcacgaacgtctcaattccgcaggtgaggccttgttcccggcatgaagactcaggtgcggtggccggcactggaaaggtgagctggccgtgtcagacaagaagtcctgtttcaatgcctttctcataagtagccataatatttattatacatggataacttcagcgcaagaagatgagaaatcaaagcctaaatcagaacttagcaacatgattacagttatgtttcagtgaacatcactctggcttcaatgagcataatgacagtgatagacagtggtagacagacacagcttaatcagtgttcaattaataacacttcacggttttaaaagcattttcgtatggattactttacttgattctcaaaataagccacagagagttaatttacagatgacactggagccgaagtagagacctcagcaaagcaacacggcggcggctcaggacaagcacatggagcctgtgaccagacccggcaggtctaaggcgttgccacctcgtgccaggcacacggaggtgctgggcttctccctggaactcagtggtgggggaaggcagccatgcacttattctcctgctcgagaaacacttcctgagatcccactgtgtgccaggcactggctctggccccgggggcacagcagtgaagcagacacaccctagcctcctggagcctgtgctccgtgctcccttgtcacgcacacgggaagcccccaccgagtaggacatgaggcccagggctagggaagtgtgcagggaggagggacagccctcagacagccagaaggagtcagatgtatcctgaacattttgtatgtaaacacccagatcattttaataaaaaatgatgctctcggtcgttattccacattttcagagctaatttccattcatcattcattcacgggagtaaaccacatttcacctgactttcacacccacattctagactcggcttagttagcttagttacactaaactctttttcatgccaagttttccattgtcagagaaaagaaaattcccagtgtccttcatggactcactatatgcaaagaaacttcagagctgtccatttatcatctcatcctcactgtccagagtcattttaatgtgccacaaggccataaatagtccacattgaagctcagggcaccaagaacccctttggctacatgccaacatcccacagtcccaacacatctcagtgaaagcttcatgtccccactcaccctgaccctatgagcttccccctagaaagctttcctttccggtatgccttccagctaccttgctccagatgagagaaaatgccaagcaattcatttagagactcatatcctaccttaaaacagaaggcataaaaaacattttggggactagtaagctcatagttttcagcacaacaagaatgatataatgaacaacttggatagagttattctcattcttgggttcagtttttctatttgttgttgtaatctgttcatactttattgggattgcaaattgttaatttacagccattatttatagccatgttctattgatgatgcttcctgaagaagctaatgcatttgggggtgggtttcttcttatgttcactgtctttaaaacaaaaaagagcacaaggcttttacatttcagtgtgtgctttgctgggctaaaccagtttgtcctgtggcgctaatacataagaaaaagctttccaggtggcaggacaagcatccgcgtgcccctgcaggcatccgagatgtcaccctctgatctcgttccattgctctggtctacctgcagacaaggactaatgagtcccaacagcagcatggtcagcacgggcctagaagacaagccacttccaatggaccaggaagttcaaaaacaaatgcaggatccttgagctctcaaataggaatgagaatattattccccggggccaggtgtggtggctcacagctgtaatcccagcactttgggaggccaaggtgggtggatcacttgagctcgggagttcgagactagcctggccaacacagtgaaaccctgtctctactaaaaatacagaaattagccgggtgtggtggcacctgcctgtaatctcagctactcaggaggctgaggcaggagaatcacttgagcccaggaggcggaggtagtggtgagctgagagagatcatgccattgcactccagcctaagtgacagagcaagactccatctcaaaaaaaaaaaaaagaatattattccctgcgattagtgacggcttcaattcctcatttgtgaaatgaggataaaatctctaccacatggggctgctgtctgactcgaatgtacgtgagtcatcatccacggttccaggcaaatatttactaatccccttctcatctccttgaaaggtctgctcgccttgacgcagcacatgaagtacgagtgcgagcagtggagcctacatgaggtggctctctgtatatcatgcatacatacatgcatgtacgtatgtctaggtgttatgtaaaacactatttaaatcccataagattcaagacttggtaagaggaggaaccaggagacctactcagccagaacagagctcaaacatttgtagcctccatccaatagcaaggacatagaggcagtccatctctgatgagagatgtgtgtcacatgatgacagtggcagtggttataatgatggtgatcaggtcttaagggcttagcatgtaccaggcactgtggccaagttctctactattatcttatttaggccagatgcagttgctcacacctgtaatcccaccactttgggaggctgaggcaggcagattacctgaggccaggagctcgagaccagccaggccaacatggcaaaaccctgtctctactaaaaatacaaaacattagccaggtgtggtggcaggcacctgtaatcccagctactcaggaagctgaggcagaagaatcgcttgaacccaggaggtagaggctgcagtgagccgagatcacgccactgcactccagcctgagcaacacgagcaaaacactgtctcaaaaaaacaaaattatctcatttaatcattgaacctcatgtgtacgtattattatcctcattttgtagatgaggaaactgaagcccaagagttggttgggatggatactaaatagactaaaggattcatccaaaggggcactgatagtagcaggcaggagctggaaccagagaggagatgagatcatccacgcagggaaaggaaggtgtaaagatcacatgggtgacaaccagaccctgggcagcacccacatcccaggggcctggggagaagatgaacctaggaagaaatcggatgagcacagcttcaagggtccggggacccagaggcaagaggaggaagaccctcaacgcagcctccaggctcggccacccctctgtcaccgtgtcttgcagcttgtttttgtttttcctcagtgacttcaaataaggacaaaagaagtatgtttgtttcaatgctgtggacaccacaggtctgtagggaacgctatcctgaaagacagcagagctgaaattataaacgacttctactggctgatacacagaaccaaaaccagcaagatgacatttagctaacagagactcgtctagctcccacatttaggttcaaaaaaatcagctgcaccggaacagaaatggggaagtggagattgacagcaggggaggggataaagaacgagggaaggtatctgacacccctacttctcctcaaggggggccaggagcacaactcagcgctggtggggagcacagcctcaggtggcatcagcatcaaagctgcccctaggcagcagctgtaatctcaggcctccgggctcagactcacagcaggcctggggttccgtcccatggtgactctgaccctgctgagcttccctatgggacatccttcctcccgctctgtattagactgggagggctgctgtgataaaggctgcaaacccagcagtggaagcaacacagattccttgccttgtagctttggggaccagaaggctcagatcaagacatcggcaggattggctcctcagaggcctctctccttggcttgcagacggcatcttcaggctcccatgtgccctccctgtacgtgagcctgcctccaaatgtcccctttctatgaggacaccaggcacattggactagggcccaccctagtaacctcattttacctggatgacttctgtaaagactctccatgtaagatcacattctgaggtgctgagggttaagagttcaacacaggaatgcggtgggaatgtcattcaacccataatactctttcagttcctgtgacccagaaggtccgtcatcagctaactgctctcctcacctgacattctagtgatctccaccccacaatgacagcaatatctgtcttcatgccaatgacactcaaatctttaccacaaccctagttctctctcctacttctagatgtgatgtcaactgcctgctcagcacctcagcctcgacacaccccacactgctctggcattcacttttgccctgggaaaagagccatattccatggaggctaagaccacgcactggggagccggaatggctgcaattctgctctccttgcttcccagctttatgaccttgggctggttatttcccatttcctcgcctagttatgtggactgataggctccctataaagagtagttaacacacataaaaggattagaaaaaagcctcggacagcatagtgtctaatacatgttgactattcattaagttaactatgtgcatgaagccattctcccaggaacttaagctttaaaaaaaaaaaaaaaaaaaaaaagtgactcttaggattagcttgtcaatttctaccaaaaaatgagcttttgatagagaatgcattgaacctgtaaatcagtttgggtaatattgccatctttttttttttttttttttttttgagatggagtcctgctctgtcacccaggctggagtgcagtggtgcgatctcagctcactgcaagctccgcctcccaggttcacgccattctcctgcctcagcctcccaagtagatgggactacaggtgcctgccaccacgcctggctaattttttgtatttttttttttttagtagagacggggtttcaccatgttagccaggatggtctcgatctcctgacctcgtgatccacccgcctcggcctcccaaagtgctgggattacaggcatgagccactgcgcccggccatgttgccatcttaataatattaagtcttctgatccatgagcatggtatgtctttacattaataggtcttgtttaacttctttcagtgatgtttttatggtggtcagtttacaagtcttgcaattctttttgttaggtttattcctaattattttgctatttttgaggtgatttgacttcctcctttccaacctggatgctgtttatttcattttctaacacaattattacctttttgcacaatgttgaatctaagtggcaggagtggacattcctatcttattcctaattttagagggaaccctttgttttttaccattaagtgtgatgttagctgagggtttttcaaagttatcctttatccatttaaggaatttcacctttatttctaatgagactttggttctgtttcctgctgatttgtatcatgaaaggataccctcagtctcttgcctgcaaatccattctccccacagctcctaatgtgatcttcctaaaatgcaaagctcatgatgtcacagctttttcctcagactacaggacactgtccaagcacaggcccctcctcatttctcaccagttttgctttgccctttgacttctggcaacaaattgattaagatttcctaacatacgctgttacttcttccctccatgatttgttctttctgtcccttctgcttggaatgcaattgctatgaccattcatttgcccctatcattctttttaaattgcatgatttcatcttagaaaacttccctaaatgcaatgtaggtaagcttcctttctcctatgctatcaacactctgtgcacatgtgtatcattacaattaccatactatattctaatgttatgtttatggctctgtctttctccatagacaatcaattcgttaaaggcattgtctctgccttattgacctttgtttcacagcatttaacacagcacctgcgtatagtatattacatatggcattgttgaatgaatgaatgaataaatgaatgactcatcaaatcaatccttcacttgaccagcacagtgatttttctaaagtgcaaatttgattataacattcaattgctaaaaacctttcaatagccgcagatacatttcaggatcaagtccaaatttcttcacagggtatcaaagattctccaggatctgccctgagcccacctctctccattcgcatcttttgtaacataccccatgctctaactggcacccagagctcattcaagccttctacgtttgcttatgtgacaccgtctgcctcagagtgccttgaacacccttccctactatttacctggaaaccacccaatcattttctcaagagtcagctcaaacatcacctttgagctctagatttgtttatacagctgtcgactttgcttggatgttttaaaggcaccctaaactcgccagatctaggactaaactcatgatcgcctctaccttacctctgccaataaaaagagaacacctttcctttcccacgtgccctagctcaagcacgattccactccccatccaacgcccaggccagaaatctgtgagccattactgatttcatcacctctctccatgtccttttcttcttcccaagtgtctctgaaatccacccatttctctctggctccacatccactttattccaagttatcaccatgttttccctcatcttgtacaacagtctcttcactgaccccctccgcctccacactggcctccccatccagcagctggggtgcaaatctcattgtcttgctcctcctcaagcgcagtcctgaaaaggctcccgttgctctgatgatcaataatacccaaccccactgtggcctctaaaactgtgtgttcaattcttcccccaccactgctcccacctcctagccctctgccacctctgctttgagcattctccctctcttcctttcaactcactaacgattactcatccttctgatctcagcttgcacttcatctccccagaaaaacctggtcttacacccttgtctaggcctgcctatgaaatcacatcccttttcttcacagcttttatctcagtttgaagtaatatcctcatttgaattaaattactatgtctacagactataaacccatggaagaaggcaccatgtcatcatgtccctattgtccagcacatggctggcacagagaaggcactcaataaagtatttgttaagcaaaatctttatcactgtaactctcgagtaggaatggccagttccctcctgcgggctccactgtgccttgtcagtatcctagcataccatgtagggcatcctgttagaatcctctgttgagtatcttctcctactggactgtgagtttcacccggacaggcttcttagtggccatccctggcactcagccgaggctcaataaatatctcacgactggaaggcgtattcaagggatgggtggattctgggggctacaagttaaaacgacaaaaggtttcattggtaaataccataaaaggggtgaggagatcacaatgggtttctccaccggggccatttgactcaaagacagagaggcttaggagagaaggactccagactccctcgcctcaggattaggagctgctaaggccgacttggtgaggctccaaaggcagggaccaggacccatgagtggaagctgcgggtggtagctacgggaaaaagcgtgtgctcccaccactggctgttaccaagcaggacgccacagccaccacacagccctgcctttgctacagcttcaactagattcctgatgttcaagagtgttcgttgaacacctgttacatgaaagccgggaacaagggaaagagatgcagagaagatccatgttacaacggaggggagctcgcagatgatcacacaggcgatcatgcaggctgcctccaaccctcgggctctaagaaatctctttaataaattaaaaggacaatctcgtttgttttaatacgtaacccttcagccaaaaaagatacatttctttgggtctattgacatgggaccccctggctgtccatcaatgtccaaaaaagcaggatagctaaaccaattgaatgtataatttgatttttgcaacagttgccaaatggattggcaatgcctcatgggaaaggggttatgttctaacaaaacaaagatatcatctctctttttcaaagacacttgcaaacctttaaaataacttatctgagagccactactgacgatcaagggtataacttgcttggggaggcataacagtcaatacacttgcttatggcccacaaggaacacatggaggggaagggagtggtgaggtttggaactggggggcccgagctccctccagtcatgttagctgtataattgaggacagtcttcttgacctctctgagcctcagctcactccttgctaaatgaaggggtaacattcgatgcagacagctgggtgaatcagaagagaaccaccacaacaccaggctaccatccgcatgctcaacacctcccgccaccacctgcttcgtgtagcctatgatcccctgaagaaaatgataaacacacagacatctggcagcaccaacctgggagcaaggtgacggaagcattcaatgcaacctggacattcactagttatgtaacttcagtgcaatcatttaacatcttaaagcctcagtttctgctctgaaaagtgaaaataatgataatgctcccacacggggatcctgcgaggctcaaatgaaaaatggatacaaaagtactctgtgaaacttgggttattatcactgcaagtagaaatactaacaaattattttttaattacatatttattttccttcttctatcatacaagagaaagaccacatgattcctgaaagaaatctggccatagcctgtctctgcagcgggagcctcggagttctgtaatattcgaatggaactgctgaagcagtggagctccagccctgcttcctccatgacctctgcagaaacagaagatgcagcctcaggctcagagagatgaagaaaaatcgtctgtttctaagttacaaccatgaagaaaagagtaccgccactgatacaatatgagggctgtcagaggagctgtggaatggagatattgcagagaagatgctaaaataaaaaggtgtgaaagcagacagaatgacaaaaatttaatgcaagaaggggagagcttcaaaaaagcagaggcccaaataaaatgagcagaaagctattgtgctgcaggaaacattggaaaagcctccctttccattcaaaagcctcccttttccattcaaaagcctccctttccattcaaaagcctcccttttccattcagaagcctcccttttccattcaaaagcctcccttttccattcaaaagcctccctttccattcaaaagcctcccttttccattcagaagcctccctttccattcagaagcctcccttttccattcagaagcctcccttttccattcagaagcctcccttttccattcaaaagcctcccttttccattcaaaagcctcccttttccattcaaaagcctcccttttccattcaaaagcctcccttttccattcaaaagcctcccttttccattcaaaagcctcccttttccattcaaaagcctcccttttccattcaaaagcctcccttttccattcagaagcctcccttttccattcagaagcctcccttttccattcaaaagccttccttctcttctttctgtggaccaggtggaggggagggaggagaagggagggaggaaccaatccaccctcaacgaatgacgaaatgagtgcaggggtctgggaagattcaggagcagaacaatgagattccatgtaacaccatgagagatgctaagcaaggggactgtcgtccaatctggggctaagaatgcaattaaaataaaaatccaactcattttcaatgagtgaaactctcagataccaattctgtgttcgatcatacattttctttttcactaaattcagtaatctttctttaaaaaaaaaaaggagggggttctttttctaagactaatgcattttcactgtcaaaacattaggaaacagtgaaaagcaaaaagaagaaaaattgcctataatcccaaaacacagaaataacccttgttaacatcttggtgtatattcttctagacatttttctgtgcacatatatataaatgcatatttttataagaacaggatcatatcattcacactgttttataacttgccttttatttcttaagtcataggtatttttctatgttaatagtctttctagacctttatttttaatggtcatatgtcataatttcattccctgttgttggacatttatgttgcttctgataaccctggtattataaataatgctataacagataacctaatatatacatcttggtgcattcatccatttttttcttcgacatgaaattgttagtcaaaaggtttgtatatgatagtagaccaagtaacagccccccctcaaatataaccacatcccaatcccaagaacctgtgaaatgtgaccttacatacagaagggactgcagatgtggttaagatgaagattctgagatgaggggattatcctggcttatcctagtaggctctcaatataatcacaagggtccttattagggaaagaaggaagcaggaatgtcagaggaaactgaatgtgcaacactgcaagctctggaggcagaggaaggagccacaagccaagagatgcaggcagcctgcagaagccaggagggcagggagacagactctccccaagagtgctgggagtgaaggcgtttcacctactgaggcctctggcctccaaaactgcaagataacaaatttgtgttgttttaagccactgagtttatagtatctcttacagcagcaataagaactacatatatgtttaataaatttaaatgtttattttaaaattatgttacttctaaagtaaacgatatttgataaataactacaaccttcccattctagtcctgcaagctgagcagcatctgtgctccggagccacccagactcccctgctgtggacagtgggcaggctgtccccagaatggaagtaacattgtcttgagcatctactatatgccaaacactaccctggattcatatcatctcttcccctaaagttggaaacaagaacttatttgacacgattttacaacttaacaaatgagagctcaagaatgtcaagtgacttcccttagatgcatgtatgtattcatccatcatccatcagctactggaagaacacctatgaacatccagacgctgaagtgtaggcactgaagttgcagcatgtgtaagacagagtctctgcccttggcggaagttccctgccagggacggacccgggaagtggagagccaggctgggtgcctaagtcctgctgcccacaacacagtaacctcccccgcccgccgccgccaagcctgcaagtctcttcctctgcctttttcttttgttcttaatacctaatacctaaaattccacttcagaaaatttagatttaaaatgcctaaatctattaccacatttactatcacccctaccagaatgcaggctctacggaatcaggaatctttctttcttccagtcatggatttatcccacacactgagaatagtgccttgcacagagcaggccctcaggaggtaattgttgaattattgaccatcgcccatgcaatttcccctgtatcccactgctctccaactccttagacatctgccgatgtctcctctgcaaaggtctgccacctacctacctccaaatcatgtccacaaatacagcacattaggcaaggaagaaagagagtactgcattttaaataaagcaatatttcatagataatgccagaatgtcttctgaatctcatccaaatcatttagctaaagtaaggaaggaagtcaagtctctctgcaaatccaaagaaaatcgagcattacatgtaaaagaggagcaaaaaaaacccaaatcaaattctcaatcctatttctgaaacaggccttgtgtaaggtgcccacagtggtgcaaagcactgtttcatgagaaagggcagccctgtgtggccaaacagatgaactgcaatgttccacatcgcctgccaccgcatcgaccacgttcctcttcctcacgccgccagggaaaatagtctgcggcccctgttttagaagttcctgccctatttaggctaatattcagaatctacaacgaacttaaacaaatttataagaaaaaaacaaccccatccaaaagtgggcaaatgatataaacagacatttctcaaaagacatttatgcacccaacagacacatgaaaaaacgctcatcatcactgctcattagagaaatgcaaatcaaaaccacaatgagataccatctcacgccagttagaatggtgatcattaaaaagtcaggaaacaacagatgctggagaggatgtggagaaataggaacgcttttacactgttggtgggagtgtaaattagttcaaccattggtgaagacagtgtggcgatccctcaaggatctagaactagaaataccatttaacccagtgatcccattactgggtatatacccaaaggattataaatcatgctactgtaaagacacatgcacacgtatgtttattgcggcactattcacaacagcaaagacttggaaccaacccaaacgtccatcaataagagactagataaagaaaacgtggcacatatacaccatggaatactatgcagccatataaatgatgagttcaagtcctttgtagggacatggatgaagctggaaaccatcattctcagcaaactatcacaaggaaagaaaaccaaacaccgcatgttctcactcataggtgggaattgaacaatgagaagacatggacacaggaaggggaacatcacacaccagggcctgtcggggggtggggggctgggggagggatagcattaggagaaatgcctaatgcaaatgataagttgatgggtgcagcacatcaacatggcacatgtatacctatgtaagaaacctgcacgttgggcacttgtaccctagaacttaaagtataataaaaataaataaaataaaaaggaagcttgaagattcctgaaaaaaaaaaagtttctgccctatttaatagtcaatgaaagggaggagatatcagtgaaccagattatcatgagttctgaaacaagagcgagattcctaagcactcgctatgcatcgcagaatgtttccagtgcttaaattaaccgcctgacttcatcagaagtggctatttttatccgttttacagatgaggaagttgaggcttggaggagtcagtgacttgctaaaacgtctcatggctaagaactgacagaccctagagtttgctgggactcagtgtttccatctaaagcaagaatgcccatctcccccaacccttcagcaggggaggagaacacatcacctgcaggcatttgctgggtgcttactgtgttccaggtacctcgcatacacacaacactcgaggtaactctcaccccaattttacagaggtagaagctgcagctcaaagagatgaagtcgctggccccggatgacgcagctagcgtgcagccgagtcaagattcactccctggtcttccacttcagatacaggtcaggtatcccctaactgaaatgctcaggaccagaaacatctccaatttttttttttcgcattttggaatatctgcatatacgtaatgagctatctttgggatgggacccaagtctaaacatgaaatacatttatgtttcatatataccttatccacatagcctgaaggtaactgtatatgatacttttgataatctggtgtctgaaacaaagtcttgactgcattttgactgtgacccatcccatgaagtcaggtgtggaattttccacttgtggcgtcatgcaagtgctcaaaaagtttcggatttggcagcattttggatttcaagttagggatgcccgatctgcacaactgttcattccagcatatcacagggccacaagagaggcacggcaatggctcagcaactagatttgggcaatgagaggggagaatgggagggaaggagagaaaggcagaaagggcaagggggcagggcgctacagatgcagagcaggccaccaggatacccagagcagcggcatggtgcagagacacacacaaagaggcctggttgcaggcagacgggcagcctcccgcagccaagcccgagtgtccggcagagaggagccctgagctgtctttccctgaaggtgcctctgtggacacagctgcccgcagcagccccagcagaccggttaggacactagtcctgagctgtgacgctatctgtctgccttgagtttccggcttaccactctatttctgtaaattatactgagctgtaccgagagaatccaggcgaaactgagaatgagtgaaatactgaggtttctctttcaagaatgagtgattcaggggacagccacagcctgccaccctgcttcttccctcccctcctgccactccctgaactcacactcagcctcatgcctaggctccggccctactgaactgctcgtgtttgccccaaaccagcacgtggtgtcagccccctgcttctccacatgctgcttgcgtggaaggcttttctacgtactctaacctaggccagtactgcttcctttattgatctgctgattacactgagtgccttaaggacagtacctatcttatttgatctgtatttccagaactaagtccagtgcttaatacataataggtgctcagtaagtattaaataaatgaatgaaagatcaacaaactatatcgcctgtccacgctgcaaaataattcagttgaggggaagagggcagactcaaaagcatgaagctctgtgaggtggatggtggtcatggttgcacagcaatgtgaatgcgcttcttgccgctgaactcctcacttaaaaatggttacaggggccggcacagtggctcatgctgtgttcccagcactttgggaggctgaggcacaagaattgcttcagtccaggagtttgagaccagcctgggcaataggctaagacctcatctctacaagaaaatatttttttaattagccaggcatggtggcacacacttgtagtcctagatacttgggagactgaggtgggaggattgcttgagcccaggagttcaagactgtagttagctataattgcaccaccatactccagtctgggcaacagagcaagaccctgtctcaaaaaaaaagaaattattacaatggtaaattttacattatttgtattctaccacaattttttaaaataattttttaaaaacatagtccacactctttcagctctggagacctgcccagttcctgcaagaaggtggcagctatgcacgcagagggcttgccaaccaccagtcccgccagccctgtgcagagctgctacccactccacagcccccactccagggccatcaaccctcagctccagaagcacagcagcttggtctgcctcacggtgactttcaaagccaaattcctcgagtttctaacttgggctgtgagtgccttgaagtgagggactagtctctcccaatgcccataacctagcctgcagtcctgggcctagtcagcattcagcagaaaacaacagtagctgccggacatggagcagagattctgtgtccagttttctggatggtattgccattttccaccaaagcgaatcaattccaagtctgctgctatctgagtgccgaatgaaataatgaataactgaatgaagcgctgaatgaatgactttggtgggaaacggagagggtggcgggcagatggaccagacaggggaacgctgtgcggtgcatctcacatggcagccagcatctagggaaacgtctgagtccagaaatcagttcagcctgactataccttcagaatacatccagatttcccaatagttattgtagcctttgtttcaataaattgcctttcaagggagataagggggaggggaggggactcagaatagaattattcattcaggtctccaaacatggataaggtcaatgcaaaagcctattaactccaggagcaagaagagagttgtaaaaagagaactgacttacaaactatattttaaaaagaaggtttagcattaattaacaaatggaaaggaggagaaatttttagagaaactaaaaatatctcacctaataaaagaattgctaatttaactcgttcgtgaagacaagatacaaaaagtttagaaggagtaaaatctctatgctgtgtagcttttattaaaatatgtggcagacaaatggggagaagtcacccagcacccacatgtactcagcaaacacagcgaccacccccacaagccagggcggctccaggcagtggggacacggagatgcacgagagccacacctcatctttgactcattctctcccaatgcttacaaccaaacttcacaaaagagggactgcatctgctgctcactgtaccccagtggctcctcagcacataatttggcttctgcccataaactctatagaaacttcccctaaaaatttcctaagtcgtcaacaaatccacattgccaaattcaggggctatttttcacatttctcctgctgggtctccctgctattaatcgtgtatatcttttctggacaatgccttggtttctgccacccatccttcttccttcttcctcttcaggctcttctgtgaacagctctgcattttcccatccctcagacgctgggatgcagaattcagcaatggcccaatttcctctcccacaggatcatgccttgagtggctgctgacattctgtggctgtcttctcccctgcctggtactaacagccatgtctctgtctctagctcagacttggctggacagctaggcatggtctcctgggcctccgtgcagcacaggcccacagcctcagcgagtccaggtggaactccgcatgggcctgccactcttccctccatccacagccacacaagtcaggaaccaaaatccaccccgccatgtcctgccaatccctgatgtgtgtccattttatcacctgaatgtcccccgtatacagcctctcctgcccatacctaactcctggctcaagcccgcatcatctctcacccccaccagcagcagcccctgcctctctctagtctagcatgagcaggctgctgggatgatggggccacaatacctggccttgctcgtaataaggtaatgccttatgtgtaagtacttactatgcactaggaaatgtgccaaatgttttaatggataaacagattcaatgccaacactccctttataaaatgagtactaggctgggcgcactggctcacacttgtaatcccagcactctgggaggccgaggtggacagttcacctgaatgaaaccccgtctctactaaatataaaaattagccaggcgtggtggcgtgtgtctgtaatcccagctactgggaaggctgaggcaagagaatcgcttgaacccgggaggcagaggttgcagtgagccaagatcgcaccactatactccagcctggatgacagagtgagattccgtctcaaaagaaataaaaataaaaacaaaataaaataataaaaatacaaaaaaattagccaggcatggtggtgcatgcctgtaggcccagctactcgggaggttgaggcaggagaatcacttgaacctgggagatggaggttgcagtgagctgagatcacgccactgcacgccagcctgggtgacagaatgagtgtctgtcaaaagaaaaagaaatgaaagaaagggaagggaagaggaggggaagggaagggggaaggagggaggggaagggggcaaggagggaagggaagcaaaggggagggggggatgcggggaaggagggaagggaagggaagaactaccattatcttcatttgactgatgaggaagctgaagtccatagagctcaagtatcttacctgagattatctgcaaggcaggagcagagccacagttcaaaccaaagcaacctgcccggagcccaggttatcagccactctatcctggtgcctctgcctacctccccagaatcatccctcacccctcactgtacccacccctgatatgacccagtgagacccaactgcttcctacgtctgcacttttctctgctcacgctgctgcctctgctaagcgccatgatcctgcctccctcgatgtctggagcagccagggtgccctgactgtccatgctgcccataactcctccaggagccccgcctgcatgcaccgcagcacactctgcatatgtgcacctacgaccaggtggtgtggagtccagctggaatagcaacctcagtgcgataacactcatcatgatgcccaaaaggcatgaccgaaagctccccaaaatcaacccctgtgcaataacgcatgcccatcaggtcccatggttcccttcccagcagcctggctgggcatcagcagtgagtgccatcacaccaatatccagatgtgagcttagaccaacaaaactcaactggaaagaagagaagccagaaaaggtgatctccctccagccctaaccctctagggtgccaaatgcaacaatgattgaaaagtcgttcctcctggaaggccatgctctcagtcacacccagggtcgggaccggagtggacacatggtcctcacctccagggagctcaagctcccacagggagtcaggactgtgaacacacacaggagcgtgtgcaagcagtccgacagaatatggttaaagaagggagggaaggcatgagtatcatgagtagtgtttctagggaaatattttccccagacatctcagggtctggcaacatgtgtgagaagatcctccactcctccagcatgaggaatttcagatactgagctggggtctggaaggtcacacgcagcaagaaagcaagcaggcagctctgcggaatgggagtgctggtttctagacacctgcacctagagcttagccaacttgcctatccgtctttttcttccaaatgtgtatacagcctcctcatccaatgaaagaatggcagttgccacatctgaagccctgcactgggcctaggcctgacatgttgccccactccctcccagctgagccaagaactggtgctgcctccactcaacagttggggagagaaagcaacttgtcctccacctcccagtgagcatcattgctacttagcttgttcgaatgcaaaacgcatgatctcgccattatagtactgaagaccaaaaaaggtagctgaatcaatcagacaggagtattcactggcagctgcctgtattttcacaatggtaccaggtcacacaggacacagaagaatctaagtgacagttcatagctttcaaaaaaaaaaaaaacttgttaacaatcagtttgagatcagagtatgcaggattcatgtcaatatccatgtgacacagagcacaggaataaagaaagagctaaggctcttgggacataagcaggacactgacaattaggtaaaggattaatggttgtgccacagatttttataagaggatttcaaaaataggggtgaagtggtttaaggactgagataggaaggggaaaaaacacctctgcacacacaccacacgccaaaagcacatgaggtactttgcacaccacagcacccctttgaatcctcacaacagtcctcggaaagccatcaccatcctcacctgacaagggtggaaacggaggttctgagggctgactgaggccatacagctggcagcagctggaatgactctcaagcctatgtctgactggcaaaaagacagcttcacctttagacatgtggtagttataggaacatgaaggtatgtgaatgggaatatctcaaagaaaattggaaatgtaagaggaaagctcaagtacgaagatggggctgatgatgagttttaagctcccgctatttcataggcatgaatatgtatttctctttctttcatttctaaagcaaaaggccacacgaaagctgacccagtacttctacaaagaaacgacagtaattaaatgggaacatctccattttctcgatgattaactgaagggaaagcatccctctcacaggagggttctgctctgaatgaacctgctcaaagagcaacggtaactccggcacccagaaaatatgcattatggataaaaggagaagttaaagttttgcagaaatctatgcagcaactgtatgaaatgtggcatatggctgtatgtcagatacatggacgagactaaaaaagatgccaagccatcatctcccactccccaaaccccagctttctcctctatcaggtaacttgctcaataacgagatgcactgacaatgaggtagttaaaggtatctaggtatcttattagtgtggcaactttgtcattttgtcatcacgtactttgatcatttcaaagtgatcaggatgatttttaaaatttgtcaataacatatcgaaggtgacattggcataatgtaagattaaccattctccagtgacgaatggttcggcagccttcagtgcattcacaatgttatgcaaccacctctatccagttctaaaacatttttttaacccaaaaaggaaaccctatacccatttagcagctgatgccccttctccccacccaggacctgaaaatcaccaatctgcattctgtctctatggattttcctgttctgaatgtttcctataaacggaatcatacatactttcacttcccttctctcacttagcctgttctcaaggctcatggatgctgagtaactgctgctagcacgagttaggagggctctttgatgattcctcgctgtcctcagagtgaagtctgttttcctttggaatttcttgctgtcatgtctggtcctccctcgaaggcaaggacagacggattgagggccaggagaggtggtgctgcctgagtgaccagtgtccaggggaacaggcctggggccaggccatccagatgtggggtgcatttcactctctccagcttcatgctttccctccccaaaatgatttttctccacaacccacagatcttttatgcattgaatagttattgtgtctccttcactagagggtaagttctatggggagatgcaccagaatttgtttactgctctctgctcctattttgacatagtaggcttttaataaatgcctgttgaatgagtgactggatgctggaggttctgacacaaactgttttcgaggggctcgcggtcccctggaaggacaggcagatgaaccaacatgcatgaggtaagcaagggggaaatatgagcccagaggagcctgtacatctctgaggaagctgggaaaaattcatttatttttaagtaaataaaaataaaattgctattagttttttacagtgaacatagataatatttgaaataaaaaatagttattgagtgcaaatcaaaaccacagtgaagcaccacttcacatccactaggatggctacaataacacagctgggaggtaacaagtgttggtaagggtgtggagaattcagaaccctcgcgcatgactggcggaaatggaaaatgcttcagctgctgtcgaatacagctcctcaaacggttcaacagagagtcagcctaggatccagcaattccacggagaggtacagacccaagaggatggaaaacaggcatccaagcaaatacatgcacacacatgttcacagtaacccgaaggtggaaacagcccaggtggccatcgacagatgattggacaaacagaatgcggatgtggaagggcagtacgatgacatattgtccagccacgagaaggaaggaagcactgatgctcagcacggcatctacgagccttgagaacaggctaagtgagagaagggaagtgaaagtgtatatgattccgtttataggaaacattcagaataggaaaatctatagagacagaatgcagattggtggttttcagagccggggtcgggaggaggaggatcggctgctagatgggtatagggtttccttttcggttgaagctgtaccctcaacctcccgggctcaactgatcctcccacctcagcctcctgaatagctgggactacaggtgtgcaccgccatgctcagctagtttctgcattttctgtagagacggggtttcaccatgttgcctagggtgacctcaaactcctggactcaagaattccacctaccttggcctccagaagtgctgggactacaggtgtgagccactgtgccctgctatatatgagtcttttacatgactttttaaaagcattttattggaagcaataaaattattatataaatgttcttttattgctgttttaacaaacagaagccctatcaggatgctcataatctgtgatttctggaagtggcagtggggtgaggacagctggagttgctgtatgaccatgtcctctatgtcacacatgtgagagccatgatctctaatttctgttggatgctatgctaggcaccctccataatcctgaaatcactctaccaaaggagacagtatcatgtctgttctctagattaagaaactaagttcacagaaggaaaatgatcttccaaaggctgctcagccaataagcaaaagagccccaacaggaagccaggtgtgtctgatcccaaattccacatcctctttgcctgtggcctctctgaaacacttgttgagaatctgacacatgccaagggttgtgggagaaaggtagaaaaatagtctttacctctcaggaacttgaaacccaattagggggacatatagacatcccactctggtctataacagaatgagctacagagactcaaggaggcatgaagaaggctcactgggaaactgatgaggatcagaaagagccttagaaaagcagtctcaggagcactctttgaaggaaagcaaggacgacgtggttgttttatagcccaacatgagctcactcctcttctggtcacaacaccctcatttccctctagagaactacccagctccagcgctactcctgtgctggggtgagaatggccaggcctgcagcctcacaggtagatctcagactcaggcctagccagccccagcctccaagaacctcgggcaggtgactgggtcgtgaagaggtgggtcagaggtttttcaatgaagacagagaagtgcacactattttctcatcatcccacctggaaaacaccagcctgacacctggccagccacattcctgccacctggagcctaagaatgacatcaagttgcgagaaacaggttagagagttgagagatgatgtctgaaactgaaaacaaacctccatctgcactttcccattaaatgagctgataaatgacctcttctgaatataccacttagagctggggttgggcatttctggatctctggctaaacaaccaaaatatcctcttcaatcttaatattcttatgcataaacattacagagaccaaaaaaatacctatctcactatagacagaaacagattggtgacagcatatataggtaaagaaaaatactcttttaaaagaagaaacaattagtaaataaatgctgcaactttatttattcacccatccattgaaaatattaaaattttactgtatgtataaaatggaacatcatctaggccactgctgaagactaagttctcaggaagaacatacctgtaaaacatatcctctaagtcattgagggtctttgtgattctctatgcttacagctatgtcctgttagatcttacaagacttatttacagcaagaatcacaaacagcaagggataaaagtacctgtcgagtcaaagcgcaccaagagctgaggtcctctgccatgcagcttcttccactctcgagcccccagcacctgcactgcctggcagtgcatctgagggggacaaagggaccccgtggacccgtaggaggaaaaaattgggagaactccaagtccatattcctgagatgcccccatgctctactccagtgccatgctaatatttatactttttagtgcattcaaagcaggactctggggtaggagtatggccgcaccaaccaaggcactgtgcaggaatcaccgagggtgctaggggtcaccattcggaacataagggctctgtcttgaggagtatctggcggcgtgaggagggcagaaaagcaacagaaaatgacaactgctatgggtgccgcaggtactctgagccaggctcggagaaaggctgagttcatatctgaaggctaagcaaatacataatagaaattcagtgcagtaattgctcccactcaagtatgtgccaactgctgtggccacacaaaggaagaactgtctctttattcaggaggaagggcaggcagaggctgtggcattgcactggaccagaaagcatgagcacctgtggagcacagcaacgtgaaacagagcactctgagcacacagggaggactccccagagacgggaagagatacaattaaaagccaggatggtatcggattgaaaaaggaccatgatgtcagtttcaactagttctggacaacagaggaggtttaaactacctctggacaatggagggggagttaaactacctgtgggcaatggaggggggttaaactacctgtgggcaatggaggggggttaaactacctctgggcaatggaggggggttaaactacctctgggcaatggaggggggttaaactacctctggacaatggagggggagttaaactacctctgacagtggacagggggttaaactacctctggagtttacaatggaggagacttaagaaaggaacagcctacttgagttttatgagagctacgatcgcagcagcagcagcagcagctgacacttcctgacactcagaaatgccgcacactgtgctaaatgctttgagtttagaaagtttccagcacacaggaagcagcaataacattacctattactatgattaaaaataattctcctaaccaacctacaagaaaagtactatcattcccaaatttataggggagaaaactgtgattcggtgagattcctttgaccatggtcaacagctaccaagtgctcaggtccaattacatgactgcacacactgtctctgagccactacacttgttggctgtccagtgtagaatgaaatggagggaagatactgaagctggtggctggttaaaaagctgcacaatacctgtggtcaaagcctgagatcatggggccctaagcatgagacagtagctatggagacagacactgagaagataagcagagataatgctactgctgttccatagggtctgcatttgtactaggttttatactgacgtatgcacaacccattaactgataacagctttcaattaatagtctacaagactactacaagaattaccaggaaggagagaaccaagatggaacagatggggcagtggaatcacaaactagaacccttggattaaagacatcttctgtggccgggcacagtggctcatgcctgtaatcccaacactttgggaggccgaggcaggaggatcacgaggtcaggagatcgagaccatcctggctaacaaggtgaaaccccgtctctactgaaaatacaagaaattagccaggcttggtggcgggtgcctgtagttccagctactcgggaggctgaggcaggagaatggcgtgaacccaggacgtggagcgtgcagtgagccgagatcgcaccactgcactccagcctgggcgacagagcaagactctgtctcaaaaaaaaaaaaaaaaaaaaatcttctggttagcccactcagtgtcacatgaaacttggtgattgaattgccttcagtcagggtacagatcttctggtccccacatacctccagtaggggactcgcttgccccatgcaagcatttgctcaccccagtctaagatatgtctatagactatggcataaacttagctatccatgcattggaaatatttatcaggaagatttcatcaatgtggtacggaaatatcagagacagcaaaatatgtccagtagtcagactagaacgtgcttcagtcttggctccacctgctcactagtacgtgaaactgggtaagtggctcagcttctctgagcctctgatgatgtcagcatctgtaaaatggggttattgtaataattaataaaatggcaaataccaagtgcctagcatggcagatgacacacggcaggagcctgagccatggtagccattataatcattattcagaagacatgagtttggggggtaaagggcaagaagaaaagtggagaagaaggaaaaatgtttagctttgaggatttttttttaattgagatttacacatattctcacttataagtgggagctaaataatgagaatatatggacgcatagagggaaacaacaacacactgaggcctcttggaggatggagggtgggaggagggagagaagcaggaaatatgactaatggacactgggcttaatacctggctgatgaaataatctacacaaccaacccccatgacacatgtttacctgtgtaacaaacctgcacatcctgcacatgtacccccaaacgtaaaagttaaaaaataaaataaattgaggtataattcacacgccataaaattcaccctttggaaacggtatacaactcagtgacttttagtatattcacagaattgtgcaatcatcatcactatctaatttcggagtatttccatcatcccaaaaagaaatcatgtacccattagcagtcactcccgattccccctcctgctttcccccaagcccctggcaaccatcaatctgccttctgtctccatggaattgcctattctggacacttcctataaatggcgtcatatgacgtgtggccttttgtgtctggcttcttccgcttaacgatgttttcaaggtgcatcatgtcaaagcatggatcagtacgtcactccttttctgggctgaaataataattctattgcattaatctacaacagtttatccattcaccagctgacgggcatttcggttgtttccactgtttgactatcataaataatactgctatgaacattgtgttcaagtttttgcaaacatgttttcagttctcttgagtatagacccagggtggaaatgtgggctcatatgataactatgttttttgtggaactaccaaactgtttttcaatgcacctggggatttttttttttttttttactgtaaccgaaagtcaaagatacttaaaaacctctttagaatttaacagacaacaaaaatggggagtacatggtgttgcctggtttcagtcgtcaaatctcagaatctattcaattacaattcaatttccaacagacaaccacttaccatgtttctttagaaaacagtacacacagctaacaggaaaatcagccaacaaaaggatgccaaagaaaattcatccaatagttgccccaaataattggtttttgaattatgaacctccattacactgagtgtcagcaagagatgtattatttctttgagggaaagggaacaagcagacattggcataagagacgccacagcagtttccaggcttctaccacagaggtcctttattacgcaattaagcaagcagcacctgagatgcgggccaggttctgaaaaagagttggttccagcatgtttcctactttgaatcacagcctcaaacaaaagaaatgaacgccaaagagattagaaaatgtaaggctcacatctccagagtaaactctacttgctgacaagaccaattctaaaaacagaaaagtaactgagtcttaagtatgtgcagacaatagctgaagatttagatgtaaaacaacgaaatctgacgacatccacgggtttaatcctgacactgccattgaacagaatatttaaaccatccagcctctctgtgtgctgtgctccaatgctatacactccatgacagtgtgcaaccgtgtaccatgacttctggaatgcagtgaggattctttatttgtgtagcaaacatttactaaggatcagaaataataaatgcaaaacatctacaactatctcacattgtaggcaatcaataaattgaagccatcctactgaacatacacttattcggcagtgaatgtgcatgccagacatcgggctatgccctgaggacagacacgtaaaagacattccttgttcttaagaaactgagagtctgatggaagagacagggaaggaaaccgtcgcaactcagtgtgtgctaagtgatgtgacaaaggaaaatacagggccactgaacacatcgacaggctgagaggtaaggaaagacagtcaaagacgatctctcttgaactatgaaagttgttttattttattgagaaataattaatatgaacaaaatgttgccactccaagtgtatgcaaaaccacccctaataaattaacgtactggtgtatccacttgcacaactaacacgtagagtattcccatcacccctaaaagtgccttcctgcctcctctctggccatctaacgtcccaccccaaagcctccagcaacgagtgacctgcctcctgttatgacagtttcactttgcacattccagaattccttatgaacagaatcacacagtctgcattctttcgtgtcttgcttccacagacagtaacgtttctgagattcatctgtgtgttgggcataccggtagctcgtttctctccactgccacgtggtattgcactgcatgggtatgttaaagtgtgtttatccattcatctgttcctggacattttgtttccagtttggggctattatgaataaagctgctatgggcatcggtcatgtctttgagtgaatccgtgttttcattttcctaaggtacataggggagaagaggaattgctgggtcatcacataagtatatgtttaacaataaatagctaaacatttccccaaagtagtcacactattttacattctcattcataatataggagagttccagttactctgtagcctcaccaatgcttgcaataatcactctttttagtcattcaaatggatcgcataatgaaatctcctcatggttttagtttgcatttccttactgacaagtgatgctgagcatcttttcatgttatttgccatgcacgtatcttctttggtgaattagctattcaaatcatttgcctatttttaaaatctagttatttgtcttactattggttgtaagagctttatgtctattctggatacaagtctttttaacagatacatgttttgcaaatacttactccaaggctgagcttgcttttttattgctttaaaagtggcttttgaagagaagtttttaattttgatgacgtctaatttaccattttgtcctttgtgttttagactttttgtcccaagaaatctctacccatctcaagactgagaagattttcttgaatgttttcttctagaaactttactgctttatatctcttatatttaagtctatgatccattttgatctaatttttatatacatgtggggttaagggtcggagttaatttttggcatataaataattagttgttccagcatcacctgttgaaaaagccaatccttccccctttgaattaccttggcacattagtccaaaatcaattgactatttatggatgggtctattactattaatggggacttcctattttgtttccattaatctatgtttatccttatgccaatatcacactgtgttaattactgtagcttcgttgtctgggatattttagttcctacatacgtcatacaaactttagaataaagcaatcaatttctaagaaaaaaaaacaagcctgctggaatttcgattacacctgcattgaatataaagatcaatttgggaagaactgtcatttttaatatgaggtattactacccatagccatgtatatctttcagtgtctttctatttatttggatcattttctcaagacaatcttttataattgtcttgggaatagacaatctcctataattgtcttgagaaaatgtatattttcttgtaattttcaatgtacaattcttgcacatcttttcttaaatttatccccaagtatataatttttgtttttataaatgatatggtattcttaactttattttccaaatgtccattgataatatatagacataggtttgacttttgtatattaatcatgtatcctactaccttgctaaattactctactttttgtaaattccttagtattttctacatgcatagtaatgttttctgtgaataacgagttttatttcttcctttccaatctgggcacattttttgttccttatggcactaactagactattcagcacaatatgaaatagaagtaatgaatatgaacatccttgccttcttaccggccttaggaggaaagcattcaccattaagcatactgttgagcacagaggcctgttagcaagtgggcttctatttccagtctcctaagtgttttgtatcataaatgtgtgatgcattttgtcagaggctcattatacatctattgctatgatcatggtttttattctccttcattctattaatatagtgaatgacactgattgaaatttgaatacttaaccagccttgcattctcagaataaatctcactagatcacaatgaaccacccatttcatagaatgctgcattctttttcttcttttaataaatatatcattggattccatttgctaatttttcaagggttttgcatacatgctcaagatggacatcgttctgtaatcttcttatagtgtctctgatgttggtgtcaggataaagctagcctgataatacaaattgggaaatgttccctcctctactttctgaaagaatttttataaaaattgtatttcctctttattataatgtgataaaatttaccagtgaaattctgtgactaatattttatttggggaaatatttttgaataatgaactgacttttattaaagaaagggctatttaggcattccgtttcatcttcaataaatattggtgatgtgcatctttcaaaatatttttctatttcatctaacttatcaaattcactcacatgaagttttccattacaattattatccttctaatgtctgtaggaaagactgatgtctcctttttcattcctgatattgatatgttatgtcttcttatcttggtaagtctggctagaggtgcatgcattttattgatctcttcagagaacaagctcttggtttcactgggttttctccattgttgtaaaattgattaatttctgatctttattttcttctcctttctagttactttggctttgatttcttcttttgagacagaacatagctcatgaattgaaacaagtctcctttcccagtgtaagcatctatggctacaaatttccattgaggcaatgctttagttgcatccagaaattatgaaatgccgtgtttttatttttagccaattcacaatgttttcaaattaccctgtgatttcttcttggagcccacgggttatttagaaatgtgttgcttaattttcaaatatttggggcttaccaatgtatcttaatgttactgagttttaatttaattctgttgtggtcacatagtatactctgtatgtgatttaaatattttaaaatttattgagacttgatttatcaccccaaatatggtctatcttaccaaatgttcaatgtgtatttgaaaataatgtgtatatttgttgttgttaagcaatctagaaatgtgaactagatcaaattggttgtgagtgtcaaagtcttctatatcttcactgacattctttctatttgatctatcaattaccaagagtggtgatatctccaactataattatggatttgtccacttctcatttcaattttgtcagctatttgcttcatgcatgttgaagctctgttattgggtgtatacacattttgaaatgtcacatgttcttgaagaatttaccctttcatcattacaaaacgtccctctttattcctgataatactactggtcaactttgtcttatattaataaagttgttcctgctttcttatgacaagtgtttgcaaaatatatcttctccaatccatttctacttaatctatgtttttatatttaaatgaatttcctataaacaatttatagttatatcttgatttttttttttttttttttttggccagtatgatagtctctaccactatattgaagctcttaggtcatttacacttaatgtggttatagatgctgttgagcttacttctaccaccttgctatttctcccgtctcttttttgttccttttctcttcttttcctcccttattttataattgaattttttaggattctattttatatagatttatcagctataacactttgtattcttttgttttgtgtttcttctgtcatttcaatgtgcatcttaaactcatcacaatctattttcaaataatatcatataaccttacatataatgtaagaatctaccaccatatatttccatttctcccttccatcctatgtttgtcatattttttcctttatatatgttttaaagacataatagtatatggaggtttttgcttaaaatgtgatcaatattccttcaaggaaacgtaaaaattcaaaaataaatttctatttattctcatatttacctatatttctaccatttctaatacatttcaagatctgaggcattgttttttctgccttagaacctcctttaagcactctagcagagtaagtcttctggagaggaattctctcagcttttgtctttatttgtatttttttatggatatttttgctggatatagaattccaagttaacagctattttttttttttttttttaccaagtgaaagatcaaattccactgtcttccaggagcattttttccaacaagaggtctacaattatcatcagttttgttcccatgtaatttgtggcttttcctctggctaaagatttttctcaatacaaccagttttcagtaatttgattaacttatgtgactgtgtgtgtgtgtccatcctgactggggtttgttcagcttcttggatctgaggatttatcattcccattaaacttgaaaattcaaaacttgatgtacttgttcaatttaagacctcatgcatgcatttctcaggctaattctcagttgccatctctttgaatatttttctctccaggattttttctgctttctattcctggatctccaactagactcttattctatgctctcaactattctttcacattttctacctgtctcactgtaacccattttgtgaagttccctaagctctatcttccaaattactctgtcttcaattgcatctagtctcttctttaactcctcaactctgtgttttaagtttttgtttacttcaaccaccatatatctattttgagaggtggggggcatggggagacagaatcttgctctgtcacccaggatggactgcagtggtgtgatctcagctcactacaacttccacctccagggtccaaatgattcccctgcctgatcctcccaagtaactgggattacagatacctgacaagacgtccagttaagttttgttggtttgttttgttttgttttgttttttgtatttttagtagagatggggtttcaccatgttggccaggctggtctcaaactcctggcctcaagtgatccacccacctcggcctcccaaagtgctggaattacaggtgtgagccactgcacccagccgtcactatatattttttattttagaatctccatgaggttctttttcaaattagcttgcttttgtctcatacttgtggttttatttcttctaataccattctgaccatatcaaacagggttctttaaaagtgtctttcctgaggtataaattctcccatctgctgcccctgtagattccccctcatggtggtctgcctccttgtgtagtttgttgtctgtggctgtacactcgtgctccacagaaattacttcttatgggaagtccatgtctctgtggccagagaagtatctctatggagcagttttctacctgggttggctgctccctgcaggtttcctatggtaaatctgtgcatcctcaggtgctaggccatggcatgcttccctgcctctccccagtctggggaccagactttcctggtccaatctgagggaagcccttcatgactcagtaccagggagctgcagcctgaactcccttctttacatcagcatacaagcctagtgctggttggcaaagtttatcacaaggaggcactttggctttagtttctgttaatcactcagattttgaatttcctctttgcttcaggtacccggaaatcttgctttccagtgcatacatttatccaaaaattctttacattatagtctctgggttgaagcaggcaaatgtttccgaagcctgcctttccctaagaccttggtctattcaactgttttctacatatttcaactaaaaaaaaaaaaaaatacggcttgggaatgttggcttccaaaagtaactgcccactactctaaattcgatttcacaaatatgtttgagaatggccgcttcccaaagctgttattcgatagacagaaaacagcttcactactgatacattagtgtctgctaattctgaaactgtacagccctaacttcatactattttaaggcaatttagtgcacgctgatctaagctcactgatcgaagcacactgcaaagtgtcattttgccaagtgtcctctcaacctcttgctcagagtctttccatttcattctccaataaagaatattaggagctggcagaacaaatctttgtgccatttgagagcttactttaagaaattctaaaaatacagcctcttggcaatcatgaccctcttgacctggccttgacctattaccctcagctgaacacatcgtcacacacaccacaacttgcatcatgccattcccccttctctgcccgtctatgcgtcccccaaactgtggctcaaccaccagcttcccagtgcagcctttccaatgcacgggagccagcactctctccctcccagagcagtttgtctgtatcactataatcagcttcctattaccttccaaaataaactagaagcctccatatacatcacctcccttatttctcacagaaaactctgcattattggggaaaaaaaaaaaagataagcttgaatttgtcatattcttcctccagttctagctttctctaccactgagccataatctccttcagggacacaatgatgtcttcacccattctttaatccaagaaacatttgctgagtctactaggtaccaggcactgtgttgggcactggaagggaataaaaattaatccctgcttggaggtgttcacagtgtagctggggatggggatggttggtggaagacctgtgtacagataaactggaacaaaacgtgtccttctgagctctacaaccccagctcctgacacagtttactgaatacacggtggaggaaagaggagagaccatcaagtccaatgatacaatcaaaggaatccacttaggaaagagatgaatgctattaaaaactaccaagtgcagaattccacctcgattacgtattccacacagcagctctgagagttcacatctgaattgaaagggtctgagaaaacattagctagtaaacagtcctgagcttctgccaattagaaatggagacctggctgggcatggtggctcatgcctgtaatcccataatcccagcactttgggaggccaaggtgggcagatcacctgaggtcaggggttcgagaccagcctggccaaatggtgaaacgtctctactaaaaatacaaaaattagctgggcatggtggtgcacacctgtagtcccagctactcaggagactgaagcaggagaatcgcttgaacccaggatggggagtttgcagtgagccaagatcaactcactgcacaccagcctgagtgacagaatgagactttgtcaaaaaaaaaaaagaagaagaagaagaagaagaagaagaggagaggagaggagaggagaggagaggagaggagaggagaggagaggagaggagaggagaggggaggggagggaggagggaggagggaggagggaggagggaggagggaggggagaagagaagatccattggtctgagcactggccttctctaccctgtgaccgggcctggagaactgactgccaatgtcagcagtcgtgggctgagagtgggggcagggccacagctgacaagaaagcaggacagcagtgaacctgcacagaaacagggcagacatatccgtgaggcccagtgacatctcagataattcctctttttaagtctacactagtctaatttaccgaagatatggcaggtggctctttttccattttaaaagtgttatactgttctttgaaaagcaacacacaaggaaaaaaaaagaattggaagaaagttcaccaaaagttgacactgtttgtctatttggtagaagtaatgctcattttttaaaccatctttatattttagaatcattaaaattagctatctcttaaatacctttattatttttttctctttttgagacagaatctcactctgttgcccaggctggagtgcagtgccacaacctcggctcactgcaacctccacctcccgggttcaagcaattctcctgcctcagcctcccgaacagctgggattacaggagtaagccaccatgcctgactaatttttgttttgttttgttttatttttagtagatacagggttttaccatgttagccaggctggcctcgacctcctgacctcagttatccacctgccttggcctcccaaagtgctggcattacaagcatcctaaataccatttttataatgaagtaaaacacatatacagaaaatcacacaaaatatgaataaggtccatgaattattacaaagcacacatctaaatccagcacccagctggaaaaagaacatgcctgcgcccaccaccctctcctgtctgctctgtcaccgagcccatccctccccagagcaccctctctcctgactgctaacacaacattttagatttgcaaagaagcaataaacaaaaataaaataattttttattcttaagttcatgataccagttctagacaggagagcactctttccatgagatagcttgccaataatggcaggctaatacctataatcccactatgttctcagattcagtcatcaattcagctatagaattgatcatttttcatagccagagaccaccatgtacgctgagtacggtagaagacatgggaagcatccaacaggcacactggtgacaggcactcctcacacagcacacataaggacaggacgcacccctgccctcccggggctctgagtccagcaggacacacgcacgtggagtcagagaactcggcacggcagggaatgctggacaggcccacttgcacagaggaggctggacaggtggcctggtcaggacatagatccaggtgctacgccatcaccaaaatgccagtgccttaagggctgtggaagtgcgtttctctctcccttaactgccacgcccaggcaattcaggcctaacagggcagctctagggggctgaggaccgagtccaccttgctgttctacctaccccagggtgtggtctgatcctgcgagtacaaggtaggccatcactcctgccgtgtcccaccagacggagaagacggagttctggtcatgctgcccaccctgtacatgtcattgcccagggctcagccgcattcccacatcaggaccaggggaagcctccaccagcgaggggcggggactgtgtggtgcagtgccacgtggtgcagtgtcgcgggcgccatgctcgggaacccggcattatttcgcagctgatggggagatggggaagggttttaggtgagaactgatgcaaacaaatatatattttaggaagtgcttaagtagctttatagcagagaggaactacaggctcagggtgcaattaggatgctgttgtggagtccaggaggccctcaaggcctgccccagacactgagggtaggaattagccaacaaaaaagtcaaggagaaggggtggctgccaaggaggacccttccatgcctcaggctccttgtctgtgacgctggggtattgttacccaaaagctattgtcacaagtctgttatgaagctcaaataatgcaaaagataataaagccctgtgaaaattataaattactaaacaaacttcaaagtaaaacattttctcaaacttaatttgaccaatttacaaagcaaatttaaagaaccccattaaagaatttctatagctacaaaatagtcactgtacaatttctatacatttttatcactgttccttgctcaatagaactacttctgtcttgttttaaaagttattaggctgggcatggtggcttatgcctgtaatcccagcactttgggaggccaaggcaggtggattacctgaggtcaggagtttgagaccagcctggccaacatggtgaaaccccatctctactaaaaatacaaaaaaattagctgggcatggtggcgggcacctgtaatcccaggtacttgggtagctgaggcagtagaattgcttgaacccgggaggcagaggttgccactgcactccagcctaggcgacagagcgagagtctgtctcaaaaaaaaaaaagttattaaatggctactcatatttaatattatatttgtaatataagcaatacaatttataagtatccttttcttcttcactgtatacttcaccaaatacgaggtttctgcatctcttcattactcttaattaattgaagcaagtagaaaaacaggaatcctaaaatgctgggatcttgacagtgtgagtgggaatgtacagctggtgaaacacttgccctcaggtgcagaatcatcaggtcttcttaattatttttaacactaaaaattaaacccaacattgcaaaatctttcccttttttttgaatcaagcaaatcaataaatctatggatgaaagccagttaaaaaacacaacagagataaatgctgttatttttattccagtgggagtgagcatcaggtcaaccacacccactcgatactcgtctctacacggtactctacagattgcgtatcccttttcccaagtgcttgggaccgtaagtgttttaaaaagatttgggatttcttcagatttctgaatacagtcacccctcgaactacataggtttgacctgtgcaggtccactcatatgcgggttttctcagccagacgtgggtggaaaatacagtatttgtgggatgcaaaactcacataaacagagggctgacttgtcatatacacaggttctgcaaggccaactagagtacttgagtatacgcgggggccttggagccgatgccccacctagaccaagggacaactgtatttgcaatatacgtactggctgagcatcccaactcggaaaatctgaaatgctccaaaatttggggttttcggagttgggacgctcgacctatactaagaagctgtagctgcttccgagggtcccacatggctgagactcagctcaaggctatacttcctgaaacacaggtcaactgttgcatgtcattgaaaaaattccagttcttcacttggacccttgaagaatactgaagagcagccactgtatgtctctaaatcccttttctacatcctaaccttctttcaccagcacaaactctggagctaacaaaaagataccaacttctcctcgtcgtcctggcctttccctgttggtggttttttttaagacagggtctcgctctgtcacccaggctggagtacagtggctcgatcacagctcactgcagcctcgacctcctgggctcaagtgatcctcccacctctgcctccctagtagctaggaccacaggcacacaccatcatgtctggctaatttttgtattttttgtagagatgaggtttcaccatgttgcccaggctggtctcaacttctgggctcaagtgatctgcctgccttggcctcccaaatcccacaggttcttaaaagcagtgatgggtcagtgtggtcgggagaggaactgggctcctcccacacctgtacatcctctgggctcatctggctcttctcatttttccagtttactccccacaaaatatccaggagcagccaagaaaatagtgctccccatcctggcctcccagagatcatgggagaaggagaagctaaatgtgcgagcaggaatagaatattcttcagcaggttgagggtgggggagatttccccagcaagaatgagtgacagtgtcactgccttcagggatttaaattttaaacaatccctggtatccataagtagatacacaaaacatacagataataaaatcaacgcacaaacacagaattgaataaatatatgacagcatgaataaaaacccgtgaatgaatgcatctctcctgatcctctgactgctgccctaatgggccctcggattaagtaacatctccctcctctgaactccaaaacacattacttctcagcacagctgttgggaagttggaactctctattctgctacaagcttgtttctatgcacagcttatatctttatccctactgaatctctgctccctgcaaaactccaaacccctccaactctgaccttgatggcacagatctcccgaccacactggcctatccctgcctttaaacatggcattcccctttaccagcctctgcctcacacttgctggcacccagacctgaaatgtccttgacctcttcctccttcaagtctctcttcactttcctgactgcccccttcaacaccgatgttccccagggatctacctttgctcctcttctctcttgattcattccaaggaaccacacacaatttgaccactatccacagctgatggtcccgaattgataccaccaggctggacctccctccagaattccagctgaaattgacttcgttagtagcacacatccacctgaatggccaacaggcagccctgtaacttcccaaataccctctgaaaccagccctcctcccgttgtttctaacccaggggatggctttgccatccacaacatggcccaaataacactacaaatgcttctgtgtatggaacccataccatacacaaatattgtttttcaaccaaatccttctcacatcaattccctcctttccaccttcactaaaactgccttctgcaaaattgaatcatttctctgcctgtgctctttcaacagcttcctaagtggcctaacacatgcctggcatatatttgctgaaagaatgctggaaccaaggaacagtttccctgctgtctccaggaattcctcctgccaggttcgtttccgcatggccacagaagtgaccgccctaaaagatcagatacacaactccttgccttagaagttctgccagctcactatttcagaagaccagctcctcttgccaaagtgttatcactgggaaaaactagcgacccaagcctcgaacaagaggggaggcattttataaatcacgttacagttctaccaagcagtaacttaaaaataagcttgcataggataagaaaatgcttataacataattttagtaaaatagaggcctagacggctcctaaggtctgatttcagctacctaaagagatgcgtggagaaaaactggaaggaaataggccataatgagagtagcacccatttctgggtagtgagattttggggaatgttttgcccttctcctttagagtcttcccaagtttccagatttttttttttacaaggatcattcattactttgtgataggaaaaaaataagcacaaataaaaacaatctcccaaatcttttgcttcgcatttgcagctcttagcacaagccatctggttttcagctctctctatggtcttatcttcccctcctctccacacctcatgcacacaaactaaactcctcctcctcagcagcagccacatatgccagtccgggaataacagccaggttccacagggcagacgcacggcctccatagctctctcatctatcttaggcattgccacattcttggtaagttttgaagcacaaatactcataaagatgtgatcaaccgaactgagaaaacagagaaatcaaagctaacaagcgcctgttgaccactgtcctataccaggagctctggtcggaaaccagaagtgaacaagttactaaaactctatagaaaacggctataataacaaccaccactaatccggccaggcgcggtagctcacgtctgtaatcccagcactttgggaggctgaggctggaggatcacttgaggtcaggagttcgaggccagcctgaccaacatggtgaaaccctgtctctactaaaaatacaaaaaaattagccaggcgtcatggcaggcgactgtaatcccagctactcgggaggctgaggcaggagaagtgcttgaactcgggagccggaggttgcagtgagccaagattgtgccactgtactccaacttgggcgacagagccagactccatctcaaaagagcagcaacaacaacaacaaaacaatgactaatccctattaagggatgaagagcagtggaattacaagcaggaattaattggttcagagagactgggcccaaccgcccaggtacacccagaggcagagcctggaggaaccagatcttacttgagaaaaggtggtcattgtgttacacaaaaggaggctgcaaagagaaagaggcaaaaagctgtgcggaagaacaaactgctagcttcttctccgccatggctttccctccttcctcactctagaaagttgctatttgagaagtagatttctttttttaaacccttagcaaattcaagaacgtgccaagtttcattgcccagcctttcaaagaaagaaggtcaaatatataagaacagagacgaatagagggtaaagcaaacctttggaggactacagcgtgtttttgctgccaccaaacagatgctgcatggttgagggcttctccaacaatcggattctcaagttcagtgtccaggaccaaagtcacgtctgctgttaatccctgttctcaaatgagaagaacgggcagtctctcggagaggccagattaggagagggtgggggttacaatagcctctacaatgctcagcatctgcccccaccaaggcacaagtgcattcgctcaggctttgatcactaagacagacaggaaacaaactcaaagctaactcttattgagggccgacaacgtgccagatgctctcatacgcatttcatccatgctcacaagagctggttgagatccatattattcttatttttcaaataaactgaggctcacagaaactcagtaatttgccagtgggggatactaatagtggtgaagtcaggtctgactttaaagcctcatatggtttggatttatgtccccaccaaatctcacgttgacatgtaatccccggtattggaggtaggtcctagtgggaggtgtctggatcatgagggaccaatccctcctgaatgactcggcgccatccctttggtgacaagtgagttcacgtgagatctagttgtttcaaagtgtgtggcacctcccaatctctctcttgctcccactctcgccatgtgacacgtcggctctggcttcaccttttgccatgattgtaagcttcctgaggccccaccagaagccaagcagatgctggcaccatgcttcctgtacagcctgtgcagaaccatgaggcaattaaacctcttttctttacaaactacccagtctcaggtatttctttatcacaatgcaagaacaacctaacagaaagcccaaatgcttgcccagccccaaatttcccccaataaatactatgctgtccacgaaaaggcagaggtcaccggctaataccccatagcacagtggaaggagcacaggtctgagagtctgtaaccctgagtttaaatctcctcccctaccctttccaacatgacactaacacatcacttacttacttctctgggcctagccaccaccaaagggtgagaagcatcactcaggactaaaatgaggatttgaaaagattgtggatggtacctggcatatagcaaaaatttgaaaaaatatggtatcccttctcttgtttataaatgttaacatcttgaagctttggttaagcaaaagactctaaatcagctgtgttcatttctaatcaaccccaggcttcaacacaggttccctgaacatctataatttgcaaatccagatccagacaatgaaggccaagcaggctgagtaaattgtcaagcctaagaaagggtttcggaaagttaaagcaaggtcacaagagtggcacacgtgtatttcacttatttaactgaaaatggtttccccacagccatgctagagtgatgggtgccatattccatggcatgatcacctcaacgtaggcaaaaggactctgttagaagaagtcactggctgacttctgcagtcaacaggcccaatcgtccacagagcaaggtgatctgcagaaacctcctggcacagtgcctggggcgtgttttctagcagtaaaaacaggcagcatggtgcaggggaggagcaagctgcccgcccacagccctcgcaccagctgtgcagtcagggcagccccattatgcagagcctcgcttcaatacctgcaaaacctgctccgacgaggtttaagaaccagacataacatgagatgcattgaatgaactgcttgtcacatgggtaactattaactattccaactaatcatataaaaactactagccactatttattggatattttccccaaacacccaaggaatggctgtttgtttatttagttatttattttttgagatggagtctccctctgtggcctaggctagagtgcagtggcacaatcttggctcactgcaacctccacctcccaggtacaaatgattctcctgcctcagcctcctgagtagttgggattacaggcatccaccatcacacccggctaatttttgtattttgagtggagatagggtttcaccatgttggtcaggctggtctcctgacctcaagtgatccgcccgcctcggcctcctaaagtgctgggattacagatgtgagccaccatgcccagctgaatggctgtttaaatcttgcagaagtaaaacaagtatttcactggggaaagacaggtttcaaacacctctgccacatataccttcattccagagttgcttggaggaaattttctaaataatctttcaaatccctggctcatcaatctaaaatgtgaaaatgtgttctgaagtgcttttctactggagatattggctatttcccccacgggaataaatttaaattacacacttagaactaaggcctagattcttgcagatctaagctttaaaatcatgaacacgaatttcacccaaactgagtgacctgccttcagaatagggagaagcttcatgttgtaggcattgcaaagcctagcttcttacctgagtcagctgaatgtaagtcttggatataaatcttcaaagttgagctgaaaacatatactagcacaaactgtccattttttatatcactggcaagtttaagaagttcagatttgagccagaaggaaagaaatgacactctcccacaaagttccataagggcagaagggatctttgtactttcagaaaaaaaaaaaaaaaaaaaaaaaagcttggttggtaattgtgcctactgctagaaagtccactggaaaggctgaaaccagtccacaggaggcccgctgtgctaatgggaagagcatgcactttgaggtcaggtgaccaaggccacctccaagctgtgcgattgtggacaaactatcgctgcaaatgaagactgtaatacctatctttcagggctggtctgagaatgactagcaatgcatgcaaagcactcagcacagtgcccaacgcaaagaaggctcccagtatgtagaagctaacacattttgtcattttgcacaaggcaacattctgggaaaagtccaaaaagcagattcagaaaacacagggtccagtcccagctccagtgcttccttggagccacaaattctaatcccggttttaatccatcattgtaaccctagcgctcccagggttgaactctctgaaaattaattccatccagacattctactgcttaaaacccccaggaccacccatttaaaatctaaactccttagtatggcaaaggcccctgtctatcttttccgcctctacattcactgtcctcctttctctgccttcctaactcctcctatccagtctctccccagcccgcaccccttcacaccccacccacagtcatccccctccctcagtatgatctctcttggataccaaaactgctcaagtccctgatataaaatagcacatctgtatataacccatgcacatccttctgtataacttactctctagatttattatacctaataaaatgtaaatgctatgtaaatagttatattgtattatttaggaactaatgataggaaaaatgtctgtacatgttcagtacagatgcagtttttttgcttgaatactttcaatccaaggtcggttgaatccacagctgtggaacccacatggacacagaggccaactgtaactgaggctcctgaaatacactaggcacattctgtgcctggacctagggcactcgctgactggaaggtcccaaaggaacctcaatacctactcatctttcaatacccagctctggtatcaactgtctttgaagctttaaaatccctatgagcatttgtatgcctacacttacacacccctgaccatgtattcttcacagatcacacctgtgacactaaaacacactcaacaacctatcgtacagctcacacctctgaccactaaaacacactcaaagacccaccatacagatcgcacctgtgacactaaaacatagtcaatgatccactatacagctcacacctgtgacactaaaacacattcaacgatccactgtacagatcacacctgtgacactaaaacacactcaaggttctactgtacagatcacacctgtgacactaaaagacactcaatgatccactgtacagatcacgcctgtgacactaaaacacactcaaggatccaccatacagatcatacctgtgaaactaaaacacactcaacgatccactgtacagatcacacctgtgacactaaaacacactcaaggatccaccgaacagatcatacctgtgaaactaaaacacactcaatgatccaccgtacagataacacctgtgacactaaaacacacaacgatccatcatacagatcacacctgtgacaccaaaacacactcaacgatccatcgtacagatcacacctgtaacactaaaacacactcaatgatccactgtacagatcacacctgtgatactaaaacactcaatgatccattgtacagatcgcatctgtgacactaaaaaacactcgacaatccaccgtacagctcgcacctgtgacactaaaacaatgatccaccataccgctcacatctgtgacactaaaacacactcaatgatccactacacagcttgcacctgtgacactaaaacacactcaactatccactgtacagatcacacctgtgacactaaaacactcagcaatccactgtacagctcgcacctgtgacactaaaacacactcaatgatccactacacagctcgcacctgtgacattaaaacacactcaactatccactgtacagatcacacctgtgacactaaaacactcagcaatccactgtacagctcgcacctgtgacactaaaacacattgaacaattcacatacagaccacacctgtgatactaaaacactcaatgatccaccatacagatcacacctgtgacactaaaacacactcaacgatccaccatacagatcacatctgtgacactaaaacacactcaacgatccaccatacagatcacacctgtgacattaaaacacactcaactatccaccgtacagatcacacctgtgacactaaaacactcagcaatccactgtacagctcacacctgtgacactaaaacacattgaacaattcacatacagaccacacctgtgatactaaaacactcaatgatccacaccatacagatcacacctgtgacactgaaacacaacgatccaccatacagatcacacctgtgacactaaaacacactcaacgatccaccatacagatcacacctgtgacactaaaacacactcaacgatccaccatacagatcacacctgtgacactaaaacacactcaacgatccaccatacagatcacacctgtgacactaaaacacactcaacgatccaccatacagatcacacctgtgacactaaaacacactcaacgatccaccatacagatcacacctgtgacactaaaacacactcaacgatccaccatacagctcacacctgtgacactaaaacacactcaacgatccaccatacagctcacacctgtgacactaaaacacactcaacgatccaccatacagatcacacctgtgacactaaaacacactcaacgatccaccatacagatcacacctgtgacactaaaacacactcaacgatccaccatacagatcacacctgtgacactaaaacactcaacaatccactgtacagatcacacctgtaacactaaaacacactcaacaatccactgtacagatcacacgtgtgacacaaacacacaacgatccactacacagcttgcacctgtgacactaaaacacactcaatgatccgctatacagctcacacctgtgacactaaaacacactcaactatccactgtacagatcgcacctgtgacactaaaacacattgaacaattcacgtacagaccacacctgtgatactaaaacactcaacgatccactatacagatcatacctgtgacatgaaaacacacacaacgatccacgcgtgaactccttttgagaaaatgtcattttatcttttatatccacagcgcatagcaattgccaggaacagagtaacactcggtaaatgtaaactacatgcataggtgagtgcatcatagatgaatgcatgcttcatcacttctccacagaaaactgtgggattgataacaagtgaggggactggatcaggacactaggaagaaaagaggaggagaataaagtgggcgaggaagagaagatagagaaaaggagagagaagaaagagaagaccttgagacaaatgtaggataatattttgcaaataaagcgggaatgagctttggaattgagaaccctaacacgagccgatgttaacataagagcactgcagtcttaaaacacacaaatcctttcttcacttggagccccttaaaaagcctgtaaagagggcagggcaggcgcctcctcctcactttgcagatgagagccgtgaggcccagagcagcacggtgactttcctaaggaaaaggggctgaggaaataaaggctgaattcgaaccccggggtgtttttgttttttgtttggttttgttttgctgtttggatggtatgcagccctgctattgagatgcatctgcctcggtatcaaggactatctagatgaaatacagtgatgtgggttttaatttcctctttccttaccagatacgtattgacatttgggccacaatccaacccttagggatatttcatttaatgagctccctgttgctttttaaaacagccatatctcttcaaaagcacagaatataaaacaaaagagaacagaacaaaagaaaacaacgcgagatttgtcacgggggagccagcacgggctaaagacaagggcagggaaggtggtctttggggctcagaaagagcctttccttgacactcccagggcagctcagatgaactgtcccctgctaacacaataatgttcaagaaacgagagaaggctagttttccccagcacatcttgtgcagcaagatgagaaggaagcttggtgcactggccatctagtctccaaggctcagcttaagcaacacccattctagggaaactgtctctgcttcctcctcagagcattcacagcatccacagggtgaccctgaaactgcctttgcaaaatgatgactgaggcagtaaaagagatctaacttaactgactccatcttgcttctaacctccaagctgtccttgttcattcctgggcataggctgaactaactttgggagaaactttatagtttaaacaaagacggtaaacagccctttcccaaagcagacctcctccttgcctggggactagactgcctttgtagtagtaacattagccacaagattaaaaattatggtttaggagtcacgcagatggaggctacaagattctgaccctccctgaaccgctcctaagatcactgcttgaggtattttgcaaaccctgtacttgatggatcagctggtaccacccagatcgataaactggcttgtctgatcttgcggcccccacccaggaaccaactcagcacaagaagacagctgactccctatgatttcagccctgaccaatcagcactcccggctcactggctttcaccaagttatccttaaaaactctgctccccgaatgcccagggagactgatttgagtagtaataaaaccggtctcctgcacagttggctctgcgtgaattactctttctctattgcaattcccctgtcttaatgaatccgctctgtctaggcagcaggcaaagtgaaccccttgggtggttacaatcgtatggtgtcactgtccactccaagtctgcctcctctctgggctgagatttcctgaatggcaggaaccatgtctctcctctggtagtctgagaagttggcctagcaccaaggacgttcttgtattcagcaaatatttattagcacattcaacgtgccagatacagtgcttgcaatgaaggacaccacagtgagacggaaagagggagacagatgatgccagcacagcaggctgaacgcggcaacacccggcacagggcaagcggggagtgcgggactcctggggggagcaacagtgcagctgaggcctggacccccaggagaattcagagagagagaagaatgggtggagctggggagctgtatggctcacagcttctcaaagcacagtacaaagcagggcttcttgcacgtgaacatgcatttgagtcacctgggggtctgtggaatgtgattccaaactcaggaggtctgggaggggcctaagggtctgtatttccgacaggtctcctggggggtgctgatgttcttagctggtaaaccacactgtgagtagcaagagtgtggactatccctggtatctggatacatgtaaagacacaaatccaggtctagaccttcccacctcacagggatcctgtgaaatgcatattaaccaacgtcactggaggaaataattatgcagacaagttaagtaacctgcctgatgtcacacagttcgtaggtgatcaagctggaatgtgaacctagggccatctacgcccccagagcctttcttccttccactgcatcatgctgctttctcaataaatatctgctcctacgcccccagagcctttcttccttccactgcatcatgctgctttctcaataaatatctgctcaactcaataaatcactaagcatcccaaagtcaaaagtaaatatttttgcatcacccgcaccacaatctatatccacagatcttccatttttttattgcagactcttatgagcttaaaaaaacacttttgagaatacatccccaataggcacatttatttaaagtatatattagtacatttttaaaagaatgcaaaaataagtattaaaacagatgagatggtaactttggaagacaatgttttgactgaaaaccatagggctaaagataaaaggaactgcatactacatacccacaaaaattaaaaataatttttaaataaaaatttttttaaaaaaggaatgccacagaaactgtgtactctagttggtaaagctgcttctcacagggtgcagaggagcagctctgaaagtgctttacatgcacactggagtcaaataagtcaacgaagagtagctggtgggacctagtttctcacggccggagagggaagttacagataaacaagacaggaaagctagaatgagccctgtgggactggactcagttacactcatgtttaaccagatggataaatacagaaataattacagagatgtgtagatgcataggtttcctagcgctatccactgaacgggcctagaagcaaggccaaccgggacaagaccttcgtaaagaattccaaataatgtctgtagatgcacccccaccagaagggggagctcagttcccatcctcccagcccctgcctccagccctagagtgtgagctccacttagtgatttgcttcccaggaagagaatatagaaaggggaccaaaaagagtcactttccaatggagaaacctggcaaacacgaccccggccaggcgatcaaggtcaacatcaccaacaagtcaggtgggcacccctgcggcggcggcataagaagggcacgtcgactccttctcactataaggaaaatatcagagaaacccaaaatgaggcgcaatctacaaaatatctgaccggcactcctcagtactctcaacgtcacgaaaaacaaggagagacaagccatcataaaccggaagacactaagaagacccggaggatagatgtcatcgagcgtcctgaatgggacccaggacagaaaaggacaggagcggatacatgagtaaaatctgaatcaaggatagagtttaactcacagtgacgcacccacgttggtttcttattgtgtggcaaatgtaccctagtaatgtacaacactgacaatggagaaaactgatatgagggatacatgggaactctctgttccatctttgcagcttttctgtaaatctaaaaccattctgaaataaaaaggtacttttcaaaaggatgagatgaaaacagatgtaatattcttcctgtgttccagtagcatgtcaccaccgtgctattctaacgccggatgcagggctcacagacccaggcctctaagagtccagagggggaagaagagtgtgacggaggcaagtggacagccaggcagaggcgggactgtggccggctgggaagcacgtgactgtctaaggcatcctaaagcaaaatattccgaaagagaaaacagaaacctgcgggtccagccagtttgcttcctctaagctgaggtatagatattggaaaccagaatgcaattttcacaatggaattaattacagttgtttatgtagtttcttgagagaaggtctcccgtcctatatttcccaaacactgttcacctgctgatctgccttgatgtaaaaaacaacaaacaaacaaaactgtttctggatttttccaaggatactgcctccactgatttttttataacaatcatttgatatttgacaaattttattttaaacttttccagaaaacagctcatagagttctcatttacttaccaatgcctactgtgtatactgttacaaaatatctttgattccccagaacggatctaatttcaaatattatatctcattgtcattcatatgttttgtcagatgataggtcttgatatttaatttaaaaatacagtcatactctgagtcattttgatgctggggacatttttatataatacatctaactcccactcaaacactaagtcaatattatcatcctagaacttatgaagggaagaatgggaaaaggggagcagccagggactgggagaggctgggggacaggatgatgaccaagcttggcacagcacacagcagcagtgccgtgtcaggcgagagggagcgagaaggctcagctggccctggtatgtcaggctcagctctgacataccatcagagctatggcaggttgggaagggctctaaggaaaaaatgtggaaggttccagcatcgtgggaaagactttggagtcaggcacacatgagtttgcaccacaacaatgccatttattagccacattagtttacaaagtatctgctctaagcctcagtttcctcattccaaatggagatatcaacacattacggttgtttggtgagataaaagctcatcttctgtaattaaaaaaaaaaaaaaaagcaatgaggctttcaaagattagtaagtcatgtcaaaatggcatgagagccaacttaagaaagctctctttggccaaattatgacaagtgaacaaacagaataatgactgtaagtgaatcaacggaaatccatgcatccaccatgatactcaaaaacagaaaagggaaataaaacccaacttctcaacttctgcagaagctcttaaacaatcccttactttgaaattagaaagtaaagggggaaaaaaagtagcatcttgtttctgtttttacccaggcactatattcctgggtaattaaatagccccagtggttgagctaaaagttctaaaatttacaataaaaggccactttataaaagtagaaaaaataatagagaaaaacctttcatagaacttgaatgacattattaaatcaggcaaagattatccattgattttaaaacattagatgcatgactgacatatttgtactactgccaaagtattgaccctcagaatattctctggttgcaaggagaaaaacaatgggctcaggctctcattgccctatccagaggtcaatcttaacctcactagtggtgggacagccagatactgggcatctatttctaaggtaatgcaacctgaagtaccaacttcacctatgaagtattctaggcaaaaatgtttcgtgtgaattcatcaagactttgcatacaaattctactttaagggaaatcaggggatggagaaacagatccaataaaacaactagacaaatccaaaaggtaagacattctacaggacaactgatctggtctcttcaacaagcgtccaaaagaaaaaagtggtgctagctgaaaacaaacttaaaagcaaaatgcaatgcaatgagtggtcctgtattgtatactggtttggactaccttgttataataaaatctggggatcaaatgggagaaattttaaaatcatctgcagagtagaagcaataaaaaattactgaaacagaaaatggaatagcactagttgaacaaagcaagacacaaaatagtatttatagtcatctaattttgaattacggggaaaacacacccgcaggtattcatatacgcaggtcattaaatgatcctgagtgatatacactctggcttcatggtcgtgatctctgggcaggaggaatgtgaaatttctctcctttcatttttgtttgtctcaacggtattcctgcactagtctttgctgatagtgcttctgtaatgataaacgatttgttgtttgtctgaaaagtccctgtgtcctaacaggctcacagtgttgctcagtgaggccaggacagtgacagtgctgaatgcttccacctgtgtgagggcttgtcattcataatgcaagtgaggacttcggaacttcacctgatgaatggcaagtttcctagcaggaagtaagatgtgaaaatcggtgcttgcgggaaggttgagctaacagacaagcacaaggtaaattccgcagaagagacagaagagaccagctggaagagatcaaacgaattctgctggaagtgagaaggactcagccgaggcagtggctctgtgtggccatggaacatcataatcatctaagagtcctttctaaggaagagtctgcagaacttccccactggctgggtaccaggagtggtggaaggatcacacatgaggccaaggtattaagctccaaagactaagaacatcaagaaaacccgaaagccctccacacagacaaactgcaggaggacaaggtacataaaggagattacagtggccagtgctgtcaaacttggtgaaaagatggacgatgatatggtttggatgtttggtctcctccaaatctcagggtgagatgtgacctccaatgttggaggtggttctggtggaaggtgtttgggtcatgggaatggatccttcatggtttggtgccctccccacagtaatgagtgagttctcactctgtgagtccaagtaagagctggttgtttaaaagagcctgccatcctattcacaatagcaaagacttggaaccaacccaaatgtccatcaatgatagactggattaagaaaatgtggcacatatacaccatggaatactatgcagccataaaaaaggatgagttcatgtcctttgtagggacacggatgaagctggaaaccatcattctgaacaaactatcgcaaggacagaaaaccaaacactgcatgttctcactcataggtgggaattgaacaatgagaacacttggacataggatggggaacatcacacaccgggggctgtcgttgggtggggggaggggggagggatagcattaggagatatacctaatgtaaatgacaagttaacgggtgcagcccaccaacatggcacatgtatacatatgtaacaaacctgcacattgtgcacatgtaccctagaacttaaagtataataaaaaaataaaagagcctgccaacactcacttgctcctgctctttccctgtgacacaccagctccccctttgccttctatcatgattggaagcctctgaggtcctcaccagaagcagatgctggcaccaggcttccttgcagcctgcagaaccatgagccagttaaacctcttttctttataaattacccagtctcaggtgttcctttacaggaatgaaaacagactaatagaaatgatgaacaaggtcagtgagaaaaagatcactggattttattgagaggaaatcttatcagacaattccagtgaacggaatttcatcaaaatgctgaggatgtaggccagatgccagaaggttacgctggaggagcttgctcaagaaatttaaaaatcatctacggagatgtcagtttaaaaacagagaaaaggaaagaaaaagaaggaagaaagtatgtgtaggaatactcaaagtagatacaatgtgatcacattaagtagcaatattgacatctcctttacaatgattctaatgtataacttatgctgcctagaaaattcttagtgtcaccaggagttaaataagatatcactggtattcacaagatacaaagattaccaaaagcatggataagtcatttgacaaagcaaaagttatcagaagtttatactgcatgatacaggaaaccatttcctgaagtctacagtaaatgtgttcatttattttttgctttgtaagaacaagaacccaaactacaatatgtagaaagattggaaacattcatcactaaaagcatcatttacaaagagagtgctatgtaaatctcattaacacagaattaatgttcaagtgctctgatccagaggaaatcgttaagattaagaactttaacttaaataaacagaaattctcagaagactgccacttcacggcctacttgaaaacaagaaattttaaatcatgaatgcactacatgaactattttaaaaatcaaagagaacaactcaaatggattaatgagaatacagatgaggaggaggaatccccacccaggagccctcttaaatgtagctcagctgccatccagacagctagttcaggcaggcctgggcaacctaattcgaatgtgggctcccgctcaccacccctcctacagtctccatctcagctacccagagtcaccatctgcccaaccatgcaaccattcttgtcctttcacctcactctccagatgctgattcccacacagtattactgacattacctaggagaagtctctgacaagtggccactctggcccaccccctcatcctcagtcttatttccaaccctcaccatcttccctatgactcactgaaccgatccttcacacattttgtcagatttattcctaagtgtgtcatttgttttgaggctgaaaaggatgttacatcatgaccaggtaaggtttatccccagaatgcaaggttggtttaacattctaaaaccaatccatctaagtcaccacattaacaaagaaagaaagaaaaaatatgatcatctcaaaagatacataataagcattcgggaaaattcagtatcctttcctaatttttcaaaaaaattatcagtaaactaggactataaggttcagaaagataaaacaattatcttttatgttacagaactgcttttaaagtcagccaaagactaaacaacatctaattctttttctgcttgcagtcttacgtttgctttcttgcttttctttcttgtcttacaattttcctgaggggctattatttatacagcaataattttctttatcataggatatcttatgccttgaaatgaatgtcagaaaattctctgtatcctgtcttccttggcagaacaaggaaaaaaatctaggatattcaagttttgatttacaaaactaataaattctggctaggggtgagtcacagtgttattactcccttacggtcttaaggtggctccacagtctgcattaaggagtctggatctttaaagtggcattcaggattcttcacttgtggtctcaccttacatgctctgacctcatcttttatggccctacttcaacaatattgccccaaatacatacatacatacacacacacatacatatacatacatatatatatatatatatttaaaaagcccgtttctccttgtttttgctgaggctggtcctttggcttagaatgcctttccaccactccctgcgcctttttgcctgcctccttcccaagccgtctgtgacccttttagtgggaacaagcatctgtcgagcacccgtcatgtgccagacagtctgctacgcatggggaaagatgaaaggaaagcacttctgccttcacggagcttgaagtctagtggggtgacagacaaggacagtgccaacgactccgcccagtgatgatgagactgcacctggagaaggcaggcaggagccgtgcgtctcttcagctctcaggaagcggagcattccctgcagttgggttctgtgcaacctccttcaccataagaactcctgttgacatactaaggatggtctccatttcaaagatggcctgaagtaacccgtccactctaacaaagcgggtaaaaagctgaggttcattacagatctgtttgaagccaaataaatataaggttttccctccttcattctgcctgtttcagtagtggagatatttctaggggtgggggatagaattctttttgtttgacgttgtctctatttaaactgctttggattttttagaaactaataatgtcacctaaatgtccttacccaaagcaaacatattggctttctgtcagtcattctcaatagcaaatctaacacaattttcctgtttagcaagaaatgcaataaaagcacacatctccttccactgtctggtttttttcctactgtcttcacatggatcatgctgaacgcactggtggcggctggttttaagagaatagttcgtgagtcccacctagcactgcaaagattccccagagtccctgcggaccctgcggatgaactacctggtgcttcgcggtgacagcgtcttgcaaagatttcagggtttctgagaatcctggtgttttgctgccacgaatcataacctgggagaatactgaagcggggctggcagctttatacatttgctagacaggtgtttctaggcttcctccaaataagcatgtcaatgcctagattatttggatgtttatgttaaaatttaatctcaggctgggcacagtggctcatgccttaatcccagcactttgggaggccaaggcgggaggatcacgtgaggtcaggagtttgagaccatcctggccaacatggagaaaccccatctctactaaaaatacaaaattagccgagtgtggtgcacacgcatgtagtcccaactacttgggaggcggaggcaggagaatcgcttgaacccagaaggcagaggttgcagtgtgccgagatcgcaccgttgcactccagcctgggcgacaaaaatgaaactctgtctcaaaaaaaaaaaaaaaattaatctcaaatgtttattaaaattccttctcaggaattcaggtattatcagttagttgctgaggcaccccaaactaagctactttgagagagcttaccatgtaccatttctatgagacacaccggaagtgtccgtaaggatgcttgtggtccagtcctaaagacaacaaaaaatgtcaaaacaaattgaaaaatatttcatctcttaaggtggtggtcctcaaactgtggtctccacaccagaagtagcggcagcacctgggggcttattctacatgcaaactcccaggccctctgcaaatggggtccagcaagctgtggcataaccagccttccaggtgatgctgattctggttaacgcagatgccactgccttaagttgctggcatgatcagatgtagcagcctatgatcaacaggaagacacactggaagagcagagcaattctttagaggtcatttcatttgctttcctgttccctcatccaacgtttaatgacagcctgctccatgtcagcccctgtagcaggcactggaagtgcagaggttcctgtggtatcccactctgatccatggacacaaagtctactggggaaaccacacatacatgccatcggcccttgaacaacatgggtctgagttgagcaggtctgcttagaagcagatttttttttcaaccaaaggtgcaacaaaaacacagtattggtgggatgtgaaacccacatatttgcagggccaacttttcatatgcaggggttctgcagggccaactgcaggactagagtatgtgtggatttgggtgtatggaagatcctggaaccaatcccccgtgtataccaaggggagaccatcatttaaaacgctggcagttggtgttggtgttgttcagacagtgtttgttgctcagcacagcaaaccatcactgacataggccctgaaggggccccgtggacacactctgcctcttccgtggcatctctgtggtgaggcctctgcagacgatccgcctaaaacaacgagcaggagtcactcccgtgtctttccttgtttgtccacgtggtatttgtttgctgcttgtctcttctgctggatgtcagctcaggaacgtcgccttgttcactgttacgcccccagcattcagaactgggcatgctctaggtgctcactggatgtttgctgaaggaatggattacatgaaatgtcacaggggttcctggagacagtgatcatcatgcaaggcaaaggacaggaactcaaggaacaggccgtcccccttctctgtccttaacatctgtgttagaattccacatgcagcagactctctctgcatctcttacttctacatttcttattaagttttgaaattgttgagcagattaaaggattcctttgaagcttttatgcttaaactttgtggaaagaaattccctgtctctgtaactattactgggacagattagaaataatttggaactgaattggatttgctattttgtaagcttttcttatctaccaaggctaatagcagaaacttaactccttacaatagccccggagaaagtattattatctgcatttcacagattggaaactgagggtcagataggctaaagggtttatactccactgctctataaatatggtttgaattgagacagaatgttttgtatcccataataagttgggaaacttagaaattatacgtaaaggggcagcaggatatcacggaaacagcgtgaactttggattcagacatatcctgatttgaattttaacttctacttagtaactgcttgaccttgggctaacttaatctttctaagctgttcagtcatttccacttgaatgatgggaagttgtagtcatgagggaagtaatctgtaaacactgtcaccgcgctaaatctcctcggcgtcacatcccgagcctctgtctcgctcttcttctggcctcggcctgttcggctgcctgccatgcctgggcgtgccagcctagcagaggggccggaaccgtgaattctgccatcagctggcccagggccgagcctgcctctgccgctgaactactgaggtgattcagggcaaggcacccagcagggccacgccgctgtcttcatctagaaaacaggaatgctgggagggacccccgcctcacaggtctgtggtgaacgcgcaccgtcaatgcagaggaaactccaggcgcagggcccagcaccaagtgagcatcggaaaatgctggacaggacactgtggcggctgctgctgctggagggaagtggggggttcctccactctctctggacttccccatccccccgtctgcctgaagaatcccagccggttctccgggaagccttctctcttccatgtccccccacgcccccgctagcttcatctccctcccttgcctaagccctttctctcctggattccctgtacccgcaccccctttcccacccagcaaaccgacgattacatggctgtcttgggaacaaacagatgatgaaggcactgcctgtccccaaggaaggccacagtcccaactgcacacctctacggcaagagcagcgctgggcaccattgcttctgtggatgttctctcccccggctctactgcaagattttcaagggcagaagcatgtcttatgcaagcctgtggccatgctcctcacacaaatcaggctgctgtaagtgttcaaggagtaactggcataatacgtgttttcctcgccgctgatgggaacagccattctgctgctccccaggccccgaagggctcgtggaaaccatttttaatttgtaacacagcttgattaagaagcaatgctatttgttgtatatcctagggtttttttttttttaaaaacttgaatacatttgctcctaagttgtctttacagattcttttggtccatttgcaactgtaattattaaaatgtaaaagttagctgggtgtggtggctcacacctgcagccctagtgctttgggagaccaaggcaggaggttcacttgaggccaggagttcaagaccaacctggtcatcaaagccagaccacatctctacaacaaattaaaaataaaaaaaagtattttttttaaaattagctggaaggccaggcatggtggcatatgcctgtaattccagcactttggtagaccgaggcaggtgaattacttgagcccaggtgttcgagaccagcctgggcaacatgttgaaatcctgtctctgcaaaaaatacaaaacttagccaggtgtggtagcacgcacctgtagtcccagctacttgagtcgctgaggcaggagaatcacttgagcccaggaggtcaaggctacagtgtgctgtgatcacaccactgcattctagcctgagcaacagagcacaaccctgtctcttaagaaaaaaatataaaagtatatagaaacttcataaacatcccacaattctttattttaaaagctaaagtaacgtattttacatgacgtatctgaatgttgttagaatcccaaaaaacccagagttaagctttattctgatcgaatgagataaaacatactttactgccttgctttgcctcactaatgaagagaatcttcaggcaaccccatggagaggggctgtctggcctcactgtctggaatatccgggtcaagaaatgtgtacagaaggcatgcttcacaagcccatggccacgaggcgcttacagtgatggggagctcagcaatataagcaaaggacaacagtaacagtgtgggaggtgctaccatccaggtgggaacggacagcagacgaggacacaggaagaagggcctgactctgggtgtgccacttgcggaggaaggctcagcagaccaggtgacctcagagctcacccaggaggacagaggagcatgccatgaatgaaaggaagtgagcaagaaggcccagccaagcaaagagcctgcgctcaggaccagcaatgcaagaagacacgcctcatccagccaggtaagcagatgcggatggctggcctcaggcaagcgcaggccacctctcatggtgaaggacaggggtagctgcccagggctggtagatgcatttcatcaggcagaggaagctccatcctgtttctgatttgctgagagttttcattctaaatagatgctgggtttttatcaaacgctttttctgtctcttgagatggcatacatagttttccattttcagtttgccaatatgcagaattacatttgcaggttttctcatgttaagctaaccttgcattccccagataaaccccagtccgtcaatattttacatagggttaaatagtagatgctcaatttttgcttaaaatttttgcatctgtgttcaggagggatattggtctgtagtgctttgggttgtactctttggggatttttttcccccatgatctctttgcctggttttggtatcagagaaatgttgacctcacagaatgacttaagaagtattccttcatttttaggtttcctgaaggaagagtctacatagatttcatattatttctcccttaagtgtttggtaagatgcataagtaagccatctggccccaaaattttctctatgggaaggcgttttttttcttttgtcttttttaagaagttttttttggctgggcatggtggctcacacctgtaatcccagcactttgggaggccgaggcaggcagatcatgaggtcaagagatcgagaccatcctggccaacatggtctctacaaaaaatataaaaattagctgggcatggtggcgcacacctgtagtcccagctacttgggaggctgagacaggagaatcgcttgaacccaggaggcagaggtagcagtgagccaagatcgtgccactgcaccactctagcctggtgacagagcaagactctgtctcaaaaaaaaaaaaaagtttttttgtttttttgtttttttactttctaatcttcttttttgttgacttttttattttattatattttccatttcaattttctttctgagccctcatgatctcatatgggaaggttttaacaaaacattctgtttcctaagtggctatgtctattgtggttgtctatatctgtgtgtaagcattggtattttgtgtcttctaaggaatttgtcacatcatctcagttttcacatttattagcataaactttttataatatattcttatcattttaatatctataaaatctgtgttatgccaactctctcatttctaatactgttaatttgtgtcttctctctgatcaatctggctggaagctgatgaatttcattaactgttctccaaaaataagcttttggttgctttgtctatgttgggtttctgtttcctatttcattgttttccactctgatctttattatttccttttctactgactttgggtttaatctacattttttttttctaatttcttaaagtgaagcacaacctctggctcccacaggagcttcccatgaatgaagctacagctattacacctacctgctcaaatgttaagagataagatgttgacaagggggagcaggaaccaacaggctccccaaagccaaccatgcacagagcttaagggaggcctggccccgcctcctggcaaactagtttcgttaggatttcaaaactgctttccagcaagctataagcaggtgtggagtgtttacagagcagtattgcacatggagggtagtagaatctattcagagccagagagcacaccacgataaatggctgcagccgtgcatgctggtgtccgctccctgactgttcacagtcgttccagccacttggaatgctttatcctccaggtctcagctggctcccacatctctatgcagctctgaaggctgtgcataagttggatgccttcaacaggcaaagccatgggtacctctagtgccacacggcacacagtccaactcagggaaaagcctcctgttgccgggcatttctgcagccccagtccgtgatgtgggcaccaagtttgggcccttctcagaagggctctcaatggagcccctgccatgttctggttacgatgacatgttttaggcacgtcatatccaactcagagggtagacaccagcctggctttgcagttgggggaagccaggctaggcagcactaagtacctggccaaaggcccacagctgatgtgggcaaagaccagactcccagctactcaggggacccgacatctacctgttccagaggcccttacacccctgcctagtccagagctgctcttgttgttaacaaccagcaggactgtgactgacctggactcactgaccaaatctcattttcctccttacatacaagaatgaagttccaatgaattatttcctaacttggtccaaccttctttctttcccctgccaggctcttttatcatttaagcctcccaacaatcctatgaaggaagcattgtcgttcaattttacagagggggatgctgagagtcagaaaagctggactgtcttgctggcttgcataaatattgtttctaagatgcatccaattcacacagtccctattttcaaccctagaagattcctcctgaggcacgcaggaaagacagtcatgaacgtggacagacacagtcactctagctaaatggaggaaggcatctttctggaaaacctgagaaacacatgttatctttcccacttctcggggtgctccctaggagcagctttcactgaattacttgtttccatgactacaccattcctcggtgatagttttataggtttagcacgattccaattaaatcacatcattcctgcttcggggagaagggctctgtaacaagctcatggtgccagatgcccctacagcaatagatgtccccacagacagcactgtcagccacttcacttgcacagctcccgctccggtccccagagaggctcagccgtcccgcagaagacaaacctcgacaaccagaaaatgccgcatgattgcacaggtttgaaatccaccacattcactactgatggatctcaggcaaacccaactgctccctcttacccaggacgcacccacgctccttccgtgggtggcacagcacctttacctagaaggcccttcacggacctttcccatcagatcctgtcctccttaagggtgggaccacaggatgaagattattagaagagacacagagggcaggcgccgggcacggtggctcacgcctgtaatcccagcactttgggaggctgaggcaggtggattgcctgagctccggagttcgggaccagcccaggcaacacagtgaaaccccatctctactaaaatacaaaaaaaaatgagctggtcctggtggcggacacctgtagtcccagctacttgggaggctgaggcaggagaattgcttgaacccgggaggcagaggttgcagtgagccaagatcacgccactgctctccagcctgagcgacagagcaaaactccatctccgaaaaaaaaaaaaaggaaaagacaaagattcatgccctgactccaccacccacagacgcggcgaacttgggcaagtcttccctaaacttccgcttccccactcacctcataggatatttacaaggattgaggaaacctgggaatgtcaagcacccaaacagtccctgcccggcagaccccaatccataaacgtcagttctcttcctctcagttcccacgctaaagccgtggaggagggtgcccaggccactcgaggaaagtggctggcctccaagggcagacgggggtcgcaaggcagcaatgagacagagaaccgatgaaatgatggtccaaggggaaggcatcaaaggcctcgagtgcaggatacagaggcgttgggactctgtccacaggtaaaattcagaaaagctgtagtgaaagaagaaggtgtcacagtgtaactgacagagaccaaagtgggtaacttggagagtgtgacatcacctcaaggagcctcagttttctccttagaggataatagcacctactcaaacaactctcaagggaatccaaaaggacaatttcgatgcaagtgcctgatatgcaagagttcctcggtaaacggtaatgatattttaatcattacatttaaatacatgtacgaacattcatctctatctatatacatttataatgattccaaagaaaaacagcacattcacccttgcaacactcaattgaagaaaacaaaatccatgccacaggcaccaagacccaaccaagtgtgaagagcatctcctagattttgaaatgttaccctaaactgtaagagcctatcctgtgagacacagaaaaaatcctcttcttgtctaacagagtacctcaaatgtgagagatgccccccaaaagaagtatgagtggaacacaaagcaaaggaaggaaccaacaaactccgcgtgcctctgaaacccttggcagcctggcctgtctcctctcagccctctccgtgctcccgtgctcaggacagcaggcctgcagcagcatgccatacacacacagacttcaggggcctctgcacctgccagccgcaggttcgggaatgccctctccactctggcctgctagctcaccccagcttcttcttccttcaatactccacttgagtgcaacttcctctcacaggccttcctcgacttcctccgtgcagccatagcaacgaggatcacctgtattctaaccactttttcttgttttatttacttgtatcttagccaccagcccaggagttccatgaagtcaagacagccatgatgcacccttgtttccccatcacacggcacgctgcttaacacggtcctcagtggacaaggctgagttactggcttgtatgacagcccccaactcgagggctcctaaaaaggaggcccctgaaatccatcactgtgtcccaaccccggggcaccgtaactgactcacaactggagcacaatatacgttgtgctttaattcagcaaagaggcagagtgagggagggtcagaaggaagcctgaacccagcctctgcagtcagcgctgctaggggcttaagggagagcgccacatctggtccactgcagaatggatggagtgatacagcgatggccaggcaaaacaaggacatcctctgtggccttgaggaggtcctactcgggaggaagtctggaatggcacaaggaaggtgggaggaagacacgaagcagcacagggttgaaagtaaactctgtgagggactggagtctgaggatgagaacaggctgcgcaatgagagggtgccggtagcagtggacggcctctggcaggatctaagcatgaggagtaacaccagaaggggacactagtcaggctcctttcccacgaaagattctataaccccgcatctggacttacagcataatacaaataaatataccccctacagctgtgtcaaaacagtttacagacacatgtaaacacctgctccccaaaattcccggggcctgcctgtgccagtgaatccctaccgtaacaaggaacacagatcgtgaaagggcccacactagtgagcaagctagtatattcaatgccatggcgagccaggcacggtggctcatgccagtaatcccagcactttgggaggccaaggcaggcaggtcacttgaggtcggaagtttgagaccagcctggtcaacaatggtgaaaccccatctctactaaaaacacaaaaattagctgggcatggtggtgcacgcctgtaatcccagctactgcagaggctgaggcacaagaatcacttgaacccaggaggtggaggttgcagtgagccgagatcgcgccactgcactccagcctgggcaagagagcaatactctgtctccaaaaaaaaaaaaaagtcatggcgaaagtctagaaggagttcaagtgctcagataaaagcgtgccaataatctatacagaaaatcgcagctggtctcacagcaaacggccagcagagctgcacgacgccaccacgacactcgaacctctccactactccaccagcatttaggaataaacacctaagatgttagtaggcccaaaggaacatctttccaaatcagcatttttcattctatccccagctctgaaagaataaccagaaggtaaataggtctgaggggtgggatttccagaattgcttagtgggaagcttggctaaacctctgcccaaaaagcaaagatgcaaatggacaaagtcatcaagaacaaccatttaaagatgttcaaactgaccaaaggcatacaacaaattgagaagcatttattcatgacaatctcgttaatcttggtaagagcaagggagactgtggcattttagacaggggctggttccactgcccctgctactcccaactccttggcacacaagttctacctggccaggagagacaagcagaagactgtctgctgctctgctacctgctggaagaggctgactttatttggatcagagggtggaaaacacatgtccaggggtgttgtcaaaaataacagtgggaggccaggtgtggtggctcacatctgtaatcccagcactttgggaggcagaggtgggtggatcacttgaggtcaagagttcgagaccagcctggtcaacatggtgaaaccccgtctctgctaaaaatataaaaattagccgggtgtggtggcgcacgcctgtaattccagctactctggaggctgaggcaggaaaatcgcttgaacccaggaggcagagacttcagtgagccgagatcgcaccactgcactccagcctaggtgacagaacgagactcccatctcaaattaaaagaaaaaaaaaaactggattttaggaggaaacagtcagggaaggtaacactgcagctggcctaaagtcacaaaactagttggggaaatgataaaacagcagacccgccagaaattcagcaggaagagccagtgaatgaaagagcacagaaggccttggtgagaccccagttaccccagtgaaaccgtttctataaactttatacaataaatcagggaagaaaggaaggggagaaggaaaaacaaaaaagcctgcagcacactcggcgatcatcgcgagggcagcctgcccggcctgcttcctcagcgctgccggagcctgaattgccccagaatcacacagaccttgctccaagaccctagttcccctaagagctccgtcgatagccgcttgaacgttacaaaacgttacgttttccctttgagatagtccttccggtcccgcataccagtgtaactaccgacatctgctggcctgaaggaccccacttatgccaggtgtctgagggacctcacggagagttaattcatcaaagaatgcagtttccacatcctgatgtttcatccccctcaccacaaccaatgaccccagcttttcaggtccttaccttccacgacccccttataacccgcagcccagaattcctcagggagatgggtttaagggtctcctcccacctcctcgtgtggcttcctgctgtcattaaactatctcttcgctgcaaaccctgctgtctccatgtcatgggtctgctactatacacggggcaaacgagcctgttggtcccacaacgctggaaacctgggcagctgtgcacatgcacaagccctcacacgttcaggacaaaccagagagggcccccatgagccactgaccctggctcaatgtgaggccttgtgaattcagacgaaagaaacagccctgcagtttgacagcaatccccaaggcacgtgcagatccatcggggaatggtggaaggcctgctgaactgaagcatttcagcacaacctctaatcagacactggctgcccacaaagctccagggcacctggggcacgccctgggaatccaggcaagcagtaaaaacaggaaggagaaaatcaccaacaaagcagagacgtcacacactgaggaaaacagactccacgaaggtaagtcaaggcaagttgcaaaactgatggacaaacaagaagaacagcaacacgcagcgccaggggagggtggtggggctcagcctccaacttgctacgatccattacctaaaagatccagctttccacaaaaaattatgagacatgcaaagaaagtctgcctcaagcccaccagacagcaccctcccgtacttggtagctccgtgcatgtgccgtgcagttgcactctggggcctttgctgcctctgctgggaagcttctcccacaccagtccccttggctaacccaagagcccagcaacacagtaaccaagctgccgtgcaaacagaagctctccaggaatggggcactccccgctaccaacaacccccttctttactgcagagcccaaaaggggagaggactcttcccctaaaactagctccttccaagttcaatccactgacatgacctccatcaaccagaactggcctattccttcttgccatgacctcatcagatagcaccccatgctcctccacccctcctcttggttgagtgacagcagctccaatgcctcaaagtccactgtatcactgactcacaagcatcttggccaagcgattctgatgttcctaaccagtccctgccctcttaaatttggcatgaggactgtaaacagcatcccaaaggctggtcctgaacacaagtgtgcctgaaagtgacattgccgcctgcagcccagtcacagctcttaggccctgcagtcctcctgctctacacgctgtccctgggccagctcaaacagccagagcttcccatgtgctgaagactcaaaaccccggagcacttgtgtaggcctctccacggagccagcagccacctctgctcactgctggcctacaagcccgcggcacgtagctttgcactgacattcacttgctaccggcatatctgtcttggcttccttggtgcttccaaaccaacaattgggaagggttgccaaaagattaagaaaaatgtacagggtaaacatccgaactgaggtatgcaataaataaacttttcaaatgaatagagaaacggcaggagagagtctgctttaatcaccgcacgcctggattcagcccacggaatctccgtgttccaaggacataagagtttgcaacaccaaacaatgcactcaagcttcactgtgacggctttccaaaacattgtccaagaacaaagaataccaagaatccagctttcaaatacacatagcctttcctttctgaaaaggactcagagctgtgcttcagaaacggctttgcagaagcccgaacggcacgtggcagatgccgtctgccataccaactcaccttcacgtggctgtagtcgcctgctttgttgctctcgggtgggttcacaggtttgccctccactcggggccgaacgacctgccgaaaaggactggacaggggaaagccactcacactgattccatctacaaaataagaacaaaaatcataagtaacacgtcagcttggttttggggtttgttgttgttgttgttgtttgggacgggtctcgctctgtcgcacaagctggagtgcagtggtgcaatctctgctcactgcaacctttgcctcctgggctctggtgatcctcccacctcagcctccctagtacctgggactaaaggcgtgcgccaccacacctggctaatttttgtatttttggtagaggtggggtttcaccacgttgcccaggctggttttgtttttgtttttgtttatgtaggggattttgttcaaaaactgtgactgtaaggagcatgccagtttctgtcctgactattctaccttgtatcagttacagctgcctgatgtgtcctccataagcacatattcacatctactatgagtaaaagctgagagtgcatcagtccttaaaaaggacagctccttaccacctggatgtgatgaccaaggccccagccttccctctgcgtttggaccacgcagagcccatctctctcctgggcctctgctgagccgctcctcaggctggaatgagttcccctcccttcgtgcagccagctctctcttgccgcttgaccttagtctaagtgctacctcctcacccagcttcaagcagccaccactctctgccacaagaccctacttaaacctccgaggagccacactctgccatctgggtttttttcttacttgttaacagtatctatcgattgacgggtctaacccacgaatcatctttaagtcctctctgcatctcacgtcgcatgtccaacccaaaaggaaatcctgctagctctgagagtatgtccagggatggctttcgtggttcgcaccaactcagagtcactgtagttttcctcctggctcttctcccccgttgccttcactcctttccctaagtcaactccccacacagctcgcagagtctcctgaggaaagggggctcacaccctgcccctagcactcaagaggaaatgtcaaagtctgcactggtctccaaggcctctgcatgatacaccatttaacagaagagaagacctggcggaatgaatgagatatttgactgcagttttatatattctcaagaacgtaaagatactgcctcctgaggagttatcttcaagtagctgcagctccctaacagaacccagctggcatgcgggagaagtctacctatgagtatggcgagtatcacagacttccagtgtaaaccaggccaagagaacaaaccaccagaggcaacttgtgcaagaaatcacgttcatactgattttgacttaagatacatgcaacagcagagacaaaagagcaaatggtagaaagtgaggttggtaagatgtggactcacatcagtatgacactttatgctttctaaacttgccctcgttttatttattctttctttttaagttccagagtacatgtgcaggatgtgcaggtttattccataggtaaacgtgtgccatggtggtttgctgcacctatcaacccatcacccacgtattaaacccagcatgcattagctatttttcctaatgctctccctcccctcactccaccccacaacaggccccagcgtgtgttgttcccctccctgtgtccatgtgttctcattgttcagcttccacttgtaagacagaacatgcggtgtttggttttctgctcctgcgttagtttgctgaggataatgaaacttgtccccattttaaagaacagcaataaacaacctgctcgcagtcatactggcagtcattgatcctaggcatcgtaccacacatgaatggatgtttagtaaacttgattggatggatggatgggtagacgggtggcaagtctgaaactcacactcggtgcttttgattctaagcctaggatccttttcgctttaacacagttgttgggaaagaaaatttcaatggctgcatatctcaaacgaacccatctaagtaacttcttattaagaaactaaagcttcttgtgataagatgaagagtatttacttttaattgacacaaaatgtatatttccaaattcgcaataacttaggcccatggccctatgcctaatatctctttgcaaaaatatgcaattaaccaagcataatagaaatagttcataatttaaaaaaaaaaaaacaaaaacacttctcttaagcatcatttgctaaggtatgtccccttaagtagttcaattttcaggatgacaaacaatattcaactgggtaaagaagaattaagcaattttctacttagaggcttcaaatcttcaaaagctaaattatcttacgttaaaaaatagtctacttgaaaagtccatggcaccttatgcccaaaatagcacatgaaggaatcagacattgtgcatctacaataagaaaaatgacaaactgatctgtttctgttggtggtgcctatggaagacacgtatgaagactgtgatcaagcacttaagagcagggtcctctctgcacttagaagaaaatggaggtgcccaactggcccctcttcaagcactgcatgtgggcagcaaaggtccacctgatgtcccacaagcagctcaggctgaataggcatgaaatgaacttcagaagattctactcctcataacaagctagacaactcagaccagctcagccactgagaacagctagaaaacatggacaaagtagtcttaaaatccatgcaagcatcagagagctaacaagaactacagggctactgtctagcagagggggaaagacagagacatgagcctgacaaacatcccctagaggtgcctgcagatttcagaagagttcaccaagagaatctgagcagaatctgagcagaacctttgacatactcaaaggactcgatgtgaaaaacagtggtgttcagtgttccccatggagagtggatagcaaatctgggaagcttcaggtagggccacaaagcaaagggtagaccgtaaataaagcagccctcactgggcctaaggcccagctttgaaccatgtcagtccctgcaactggtaggccatttttctaccagaatttattccttgtcactccttgttctacccccatttttttttacctttatgtattggtaattctcttccctctgacaatctgatatcctaatatgccccaatttttggtctcagttcaaatgctacctcttccataatgcctcccctagctgtcctaatggaaagcaagtacgtcttcctcagagttccagcatcttctctgtcctgagacccgtgcctacctcctgctgatctgtatacatgcagagagcccggtaggagatcagaggggtcggggctgaggtgcggctccccttctacctggctgaatgaacttcatcaagtcaaataaccttctacaagctttaaatccatcatcccctaaatgggaataattagaacacatatactgtgaggttatacagaagaataaacgaattattgcataggaaggatttatcacaacgcctggtacggggcaagcattcagtaaaaagagctgttcttattcctactgcagcaaattatgcatgtcttacattccttcatgactacaaactccttgaagactgaattcttgtcagattcaccattatgcccctcatagtagctgatgcaggctctaacaaattgtaagccctcagtaaatagtaactaaatgaatgaataaattacagggtcaaatccagtatttagttgacacgcacacagtttacacacacacgctcaataaaaattccatcatcccaaagtcacattcaacaaccaactcctggttaactgaaatttcatcaggtagatatgtgcgaagacttatttgtaaagactcaatcaaaagctgttaagtttgaatgagtttattttctctcttttttctcatttctctcagcaccatggacacaatttataaaatctctccacgacaccataatgcctgctgtgaagggtactagtattatgaacagagccatgtgcaaaacgtaaactccacatttctctagcatgttaccccaggaaccaggtcaagcggacctctaagcaagcatggtatgaaagaccactcaatgtgacttcacccagtaagccgtcctctgttgagtgaaggccaggtgcccaaaggggtatttttgccatctcatctgtgtgtgtgtctgtgtgtctctctgtatctccacccctctctctgacatatacacaggacccgtaatacagcctggccagctcctcccgagggaaggctcccatccttcgcaaattacaccaacgcttttatctcctgaaggacccagattctttttgtttgtttgtttttgccttggaaataccaatcctattttacacttataacaatggtaaattcttcatttctggaaatggtcagaagttttggcctgtagaggaaagcagagtgaacatctggcttttgtctgcccagcatttctcgtttctttggggagcagctccttcttcatcccatgtggttctggtgggatcaaggttggccttgatcctgccatggccagagatgaaaacatcccatcaacagtgtgtatccagagaacaaacagaaggtacgagaagggacatgaaaagccctcctttgagatttgatttacaaattctaggaagaaaagactccggtttgtcttcctctgaatcacgttataaagatccagctatgggccagcgtggtggctcacacctgtaatctcagtactttaggaggctgaggtgggcggatcacttcaggtcaggagtttaagaccagcctgggcaacatggtgaaaccccatctctactaaaaatacaaaaaacagctgggcgtggtggtgcatgcctatagtcccagctactggggaggctaagacaggagaactggttgaacctgagaggcagaggttgcagtaagctgagatcacaccactgcactccagcctgggtgacagggagagactcggtctcaaaaaaaaaaaaaaagaaagaaaaagaaaaaggaaaaaaaaaagaaaaagatccaggtatggggcctgcctgcaaccctccttccacaacacattgagataccctgggcaacacacaactctatgaaccttagttttcttggctctaaaacaggaaccaactaaaaaactcaatgagatttgatgtaaaagtacttcagaaaaacacaaatcagcaatgttttagaactaggaggctgtgggatatgagcactttgcaaaaaaaaaaagaaaaaagtcttaaaattccatctgaaatttgcctcctttttggacacagacctcaaaatctccaagaaacccccaaaacctgtcatcttcaagctcagaaaaatactaagaaagccactccatggattctttatagactacagaagtctgttctcaaatccaactaaagatacaaaacacaagaagcatataaattacaaatggggacaggtaggaggcagaagccagccttcggaaaactgaagctgagcccttcgcccatacaggaacagagctggagagaagggggcagctgcagagggatggcgagagatgagatggaataagatgtcgtgagcagggaagcaaatcactgggcgcgcctgggaaggatctctctccagctggggtggggtggaggggagaaaattatgttcaatcatttagccaatttttctgccaacacaggctatcacaaatagaacagagaacagattgggatgacaattaataggaagacaggacaaaaaaagttacaaacagatgaaggcggcctagtaggaggactaaagagtttagtggatttatcaggacagagggtatttaagaatggtatgagtctggtagatcatcatgaataaaactgagctttcagagagaatttcatacttcccatttatagtgctcaacttttctattaagagcaactctgtgggaaattcagaaagacaattttgtatgctaaaataatacttctctctagaattcagccatatcccaaccatgatgacaattggggaaaatgacagctgaaagcagaatttgtgcaggggaaagaaaaagcagagtcacaataaaaacagctcttctagaaaggggtgagggccaagggccacgtccgtggcctggcaccaggcgctcagtgcacaccatccaactcttcacaccctgcaaagtcaggcattctcttaccaattctacagatgaagaagctgaggctctgagaaggtaagtaccttgctcaatatcacacagctcatcagaagcacagccagaactaggcctcatgacaactggattggtcactacccagcaaaactgacccaaggaatacatttcagtccccacactgagcttccagaaaagctcaccagccaaggttgttctgtagcacatcactgggtcaaaactgtacaccatgcgttccactaaaccgatcacaaggacccttgcaggggcttagcatctatctccagtggtgggatctatgcagggatgtgtccattttggtacactttcaaaagagacactaatgcataaggttgaatacattttactctcttgtgagaggcaccaaaaataaactagaataaaatacattaacaaaggcaacaggaggcaacaatcgctcagtgggagtttgtcagggtatgctgttccaggtagaatatattttaaagatgctttctcatttagtcataaaatctacaggtgccaaaaaagcccatctggttatcataaaatatcctcaagaaaaccaaagcagtagaagcagttggctaagaaattagccaatactcatccttaatttccataaagaaagcggcatgctcgttcattcagaaactttggaatatgcttaggaaagaaaaaataatcatacaggaatagtggccttcacatactattcaaatggcaacagtccacattccccatgggcagcctcactttgagattggtcttccttctgttggatgctccctgcagtgggaccagacgtaaagtcctctgccctcactgacatcagaagcctccatgtacaggaggctgtaactaccagctgaacacgtgaaatgttctgggtggttcccagcttgttctaaacttagactgtggggacgattgcacaaccctgtggatacactaaaagtgactgaattgtgcctcacgtgaattctatcacaacaaatattttttaaaaactaaaagggtagtacaactgtgttacagtacaacacactttgagggtaggggggaagataaagagaaaagagagattatatccaaatgaataacgattagaccagaagctaacctcccagcagcaagggaagtcataagaattcatcttcaaaatatgaaagaaaattcatctgctacactagacttaggtatatgcagaacttttttttaagaatgacggtgacaaacacattttttggctaaaaactaagagaacctaccaccaacacgttctcactagggacttctaaatattatatttcaggtacatagaaaataatttcagaaggaaggtcaaagatgtagaaaagaatgggaaacacagaaagcagtaggcaagcagatacatcgaacattgtgctttagtcaattccgtatgttttctttttctttttttttttttttttttttttttttttttgagacacaatctctctgtcgcccaggctggagtgcagtggtgtgatctcggctcactgcaatctccacctcccgggttcaagcaattctctgcctcagcctcccgagtagctaggattatgggcacctgccaccaagcctggctaattttttttcgtatttttagtagagatggggtttctccatcttggccaggctgctcttgaactcctgaccgacctcgtgatccacccacctcggcctcccaaagtgctggaattatatataggtgtgagccaccgcacccggcctcttttttcttttttgagacagagtcttactctgtcgctgaggctggagtgtagcggcgcgatctcggctcactgcaaccactgcttcccaggttcatgccttggcctcccaagtggctgcgattacaggcgcacgccaccacacccagctaatttttgcatttttagtagaaatggggtttcaccatgttggccacactggtctcaaactcctggcctcaagtgatccaccagccttggcctcccaaagtgctggggttacaggtgtgagccaccacacctggcctccatatgttttcaatgtaccaaatattcccttggcctctaaaacgtacaaagcaacatcacataggcagaaaaggtcctttaaagttgcagccctaaaatctgagagtgagatttccttctagggtcccagataactccacatggcagtgcacacagacagacacttcctcccagtcatttcacagggagtccagactgtcacctgccaggggaaatgtaaacattcacacagcagcaaggccatctcacaacaggcacaagcacataacatgctccaagagccaacgtccaaccaagactgcatgtggcacctgctggtaagaatgatctcctttgctggacaaagacactggccacacagaaaaccaactacaaagcacttttaaagcactggacagtcctgttagcagaaggatattattgcattttcttcccttctaaagatggttaagaaaaaaaagaagtagggctgggcacggtggctcatgcctgtaatcccagcactttgggaggccaaggcaggtggatcgcctgaggtcaggagttcaagaccagcctgaccaacatggtgaaaccctgtctctactaaaaatacaaaaaaaattagctgggcatggtggcaggcgcctgtagtcccagccactcaggaggctgaggcaggagaatgatgtgaacccaggaggcagagcttgcagtgagccaagatcgggccactgcactccagtctggacgacagagtgagactccatctcaaaaaaaaaaaattagccaggcatggttgacacacgcctgtaatcccagctactcgggaggctgaggcaggagaactgcttgaacctgagaggtggaggttgcagtgagctgagatcgcgccactgtgcactccagcctgggcaacaagagcaaaactccatctcaaaaaaaaagaaaaaaaaagtggatgaaactgaagcaggtgaggactcagccacaggtaaggaaggcatttgtgagcactggggatcggtcctggagggtaggccctcttctgcggaaatcatcaagagaagtggaaactgtggctggggcttttaggaccccttttagggggtccctctgactgacacaggaagtcagacttggatctgggcgcttacaacagtgacctgcactgacatctttactagaccatagagtgctaggggcaggaagcctgcatttaaagtctgtatccaaatagtttgccacagtgcctagcacatagtagctatggagaaagatatttgctgggtgaatgaatgagctaatgtcatttcctagttcctctgtgataagaaatgcctcgcagcctcaggtgctgcccggcacatgggaagcccaggacacgcctccgaggccagcatttccagggacagtgatgcaaggacactccctgaagttgtgtcatgtggcagccaagaactgtatgcctgcactgaaaagcacctaataaggacatgaatgaatgactttgtgaattaatgacttcatgaatgaataagtaaatgaccatcttccagcaaaaagagagaaaagcagtttgttgctaggctttcaaatccaaagattattttttaaaactgctagtaaatcactgccttttctttttttttttttttttttttttttttttgagatggagtcttgctctgtcgcccaggctggattacagtggtgcaatctcggctcactgcaatctccgcctcctgggttcaagcaattctcctgcctcagcctcccaagtagctgagattacaggtgtggcaccaccacacacagctaattttttttttttttttttgtatttttagtagaggcccctctctctcctccaccacacacacaaatgttaagtccctggaactgactttgctcttttctgccacagggtttttacacgcacataaaacaacactttcctaccctacccttttcacctatttaagtcctgccccttctgtaaatcttacctcagtaattattcccacagaaaagtcttcccagccctttaaattaagtcaaaccctgattatatactcacaacatcacatattctgtacctagcatttagcagttagtagagacagggttttgacacattgaccaggctggtctcgaactcctgacctcaggtgatccacctgtcttggcctcctaaagtgctgggattacaggcgtgagccactgtgcccagcctgttttttttaaaaaaacatcttaaaatagagatgggtcttgctatgttgcccaggctggtctcaaactcctaggctcaagctcaaactcctaggctcaaacgatcctcccaccttggcctcccaaagtgctgggattactggtgtgagccactgcgcctgaccataaatcacttctctgtagtataagaatgccagaatggattgctttaaagagtaatgagttccttgtcactagaactggccaagcagaaggcaggtaacttcttggccaagatcttggggagcaagtggagggaggaggaactgggggaacctggcttcctcacaaggtagtatgaactgcttttgtccttttctctctctattaccctagcccggagcagagtcactggatgaagtcccaaaggattaagagacatgcaggtctgggttcaagtcctaaaggtgttctcttcacttgcccagaagcaatttgctgaaaggagcactagatatggagtcgaagccccggcccctctgacctgaggaaagacattcaacgtcactgcgcatcaacagtgacgatctcaacagcacggaggttccaatcctcttatgcctccaccccaggttttgtgtcttttgtatcttgtttatacgtgttactccatttctacttgaagagaaacacaaataaatgaacatcaattccccaaagaaagccacagaaatagctcaattaacatacgttattttaggataaaaatcagggaaacaaaaccagaacactgtcagtttgagattaaagtagaaggcctatttcataggataataaaggaagaatggtggtttcccaagccaaagcgtgacatgtgcttgttctccttttagaaactagaaattcaaagtataatctgagtgtttcgtgtgttcttcacagttgtaccaaagcactgcgcatccctaaaagacaggcaaagccattatctcttcattaaacagtcagccgaatcaaagaaatcacagagctgacagtttcaaggtagagcattgatttttaaaagtctccaaagtaaaggctcaccccatcatccctcaaaatgtttcttctgcacaaattagttttaactcctatggcctaagtttcttaaggactttttttttttttgagacggagtctcactctgtcacccaggctggagggcagtggtgcgatctcagctcactgcaacctctgccctccgagttcaagcgattctcctgcctcagcctcccgagtagctgggatcacaggcctctgccaccgcgcccagctaattttttgtgtttttagtagagacggggtttcaccatcttggccaggctgctcttgaactcctgacctcgtgatccacccgcctcagcctctcaaagtactgggattacaggtgtgagacaccgtgcccagcctcaaggactaactttataaaggcttctttctcccctccctcccttcctctctctctcacacacacacttcctctctctctctctctcgctctctccctccctccctccctctctccccaccacacacacacacacacacacacacacataaacacaccctctctctcccctaccacacacacaaatgttcagtccctggaactggctttgctcttttctgccacagagtttttacacacacattaaaagaaaaaaaaaaaaaaaaaccttttcctaccctacccttttcacctatttaagtcctgccccttctgtaaatcttacctcagtaattattcccagagaaagccttcccagccctttaaattaagtcgaaccctgattatatactcacagcatcacatattctgtacctagcatttagcagttataatttttcatttatttgtgaaattgcttatccctctcactagacttatgctaatacagtagccactagagaaatgtgggtacttaaatttaaagtaattaaaattaaatacaattaataatgagtcattgagatcaggggtccccaacccccagtccgtggcctgtaggaactgggccatgcagcaggaggtgagtggagggccagatcagcagaggcattagattctcataggatcacaaaccccactgtgaaatacacacgcgaggcatctaggttgcacgctcttcatgagaatctaacgcctgatgatctgaggtcgaacaacttcatccagaaaccactgtcttccatgaaacccaaccctggtgccaaaaagcctggggactgctgctttagatataccatccatgtctcaagtgaccaaggccacatgtggctggtggctgccatggtggacagtactgcacaggccattccctccagtacagaaagttctgtggatggtgccaccctggacgctgagctcctagagggcagagactgtgtcttattttaatctagacactcccaagagtagcagagtgcatggaataaaacagatatgcaataagtatttgtgaggaagacagagaaaaaaaagaactatgactgctttctttgctaaaccgtgccccactttataaaaacccagaaagaaggaaattgtgtaagtcctgttacctgattagaagagaacattaagaattagttacttccataatttaagaccgtatgacataattccaaatcttctataattcctgctctctattcaacaaatacttgtgagtacttaatatgtgccacacaatactacacacacaagttaattcaagatggttcataggcctaaatgcaaaaactaaaacaatacattctctagaagaaaacataatatttccatgaccttgatgtaagtaaagatttcctaaacaaaaattagtgctaaccaagaggaaaataattataatacaattaagaaatctaagaaaatttacaattttttttttctgcgttggagtttcactcttgttgcccaggagggagtgcaatggcacaatcttggctcactgcaacctccacctccccagttcaagcaattctcctgcctcagcctcccgagtaggctgggattacaagcgcctgccaccatgcccagctagttttttgtatttttagtagagatagggtttcaccatgttggtcaggccggtctctaactcctgacctcaggtgatccacctgccttggccttccaaagtgctgggattacaggcgtgagccaccatgcctggctgaaaatttataatttttagttaagaaatctaatttaaaaaattgataaattctcttcattaaaagacaacatcaggaaagtaaaaagcctagccacagaatctaaaatgtgtgcaatactcatagctgacaatggactaatatccaaaatatgttgagtactactataaatcagttggaaggtaaataacccaataaaaaaatgaagaaaatattttaatagacacttcacaaaagtatatatccaaataataagtatataacagatgtgcaacatcactggctacttgggaaaagcaagttaataccacagtgagacaataccacatgtagaccagaacagctgtaatttaaaacactgacaataccaatgggtggcgaggagctggagcaagagagagttcatacatagtgctgggatgtacagaaatcccaagaaccactttgaaaatctgtttggctatggatctattaaagccaacataaacctgagcttatgtctaccaaatacatgcacaagaatgtctatagcagcatcattcataacagcccaaaagtaaaaaccacccacatgttcatcacaagtataatgaataaactgtagtattttcacgcaataccatccagccataaaaaagaacaaatgcaacacacaatatgcatgcatctcagatatcatgtggaggaagaaggaaaaaaacaagagacactgatttcagacttctaacagggagacattaagagtatacagttgtgacactttaggccaaaggaaaaaagaaaacaaaagaaagtacactgtatttcctttttttttttttttttttttgagacagagtctcactttgtcacccaggctggagtgctgtggcgtgatcttggctcactgcaacctccgcctcccaggctcaagcgattctcctgcctcagcctcccaagtagctgggattataagcgtgtgccaccatgcccagctaatttttatatttttagcagagatggggattcaccatgttggccaggctggtctcgaacttctggcttcaagtgatccacccaccccagcttcccaaagtgctgggattgcaggcgtgagccagagtgcccagtcacttatttcttctacacggaatttaagtaaaaacaaaactaatttatgatgatagaagtcataattgacaattatctttgtgggcagctattgactgccacaggtctcaagagaactggagggtgctgaaaattatttatatcatgagctgggtgtttacatagattcatatgaacataaaaattcatcaagctataaacttaacatttgtgttcattactgtatgtaagttacacttccataaaaaaagacttcaaacaccacttaacaaaaaatatcagggaataaatctagtaaaatctgtgggacctttatagagaatatgaggcaatatttttgaaagacatttaaaatgaaaaataaatgaagagacatacaatattcatagataggaagactaaccaccataaacacgtcacttctcccccaaattaatctatagatttgatgcagtcccagtcaatattctaacatactgctttgaggaacttgacaaactgattctaaaattgatgtgggctgggcgtggtggctcatgcctgtaatcccagaaattgagaggccagggagggcggatcaccggaggtcaggagtttgagaccagcctggccaacatggtgaaaccccgcctctattaaaaataaaaaaattagctgagcgtggtgacacacgcatgtagtcccagctactgaggaggctgaggcaggagaatcacttgagcctgggaggtggaggttgcagtgagccgagatcatgccactgcactctggcctaggcgaaacagtgagacttcatctcaaaaaaatataaaaaataaataaaataaaattgatgtggaagatcatcagacaaagaacatccaaaaagctcctgaacaatcatctagtagggagacttgccccatcagacctcaaaactcatcatcgcagggaacagagaataagcagcaactaggtctgcctggagaaacccagaatttggaacaactgccttgagattcagagaatgagtaagagtttttcaagaaaacaagcagaagacagtctataccagtggttcccaaactttgctgcacattagaatcttttggggtgctttgaaaaactgtaagtccagttaaatctccaaatttaggactaggagccaggcagtgttttttaaagacccccaggtgattccagagtgcagaaaagctggagaaccactggtctattcttgcagtaaatatgagagcacggtgcaactaattcagaattcctggaatataaaccacaggagggaggagggggacagggaggcagcagcaagagcagagcgggcaggccccaggaaaggttgtcctgagggtgacgggatgccaccagaagtcacccaacagaagaggggcacagtgagattctgccttagaaacatgactgcggtgacaatgtggaagatagtggaaaaggggacaaaattagcagccgggagcccaatccaaaaactactaaaatggcaaagatgagaaatgacaagggcctgaatcagagcagtgacgcggacacgaggagaaggcgtgaaaatacttagaaaaccaaattggcaagacttggtgtgatcaacacgatgagctaacagtaaaccaactggtagtgatccgtagaaatcatccctttcctctttggacaaaaatactctgaaatccctgtcctgaacacctagctgacttgtctcacggtgagtcaccgccagcctgggcggaaagggcagtaatgagaacagccagctcagtggtccaggagacgtcggttccggctgcctgcaatggggatcacctgttgctgatgaatgacaaacacctggattttcattctatcctgctagtttaggaagttattttccaacccaaatttaaatcaaagaagtgagtcaacctccccacctacaggctaacagtggctagggagacgtgcacttacaggttattagacagatgtctggggcatattcagcttacgggtgttggaaaactttcagtgtccaaaggagacccagcaccaggaaggtgctcctgagagctccagggaagcaggagcaggctgacctttccctcggctgcgccgccacgctgtgaaattactgcctatgagtcagactccggggagatggcacgggctaaatataacgctgggcaggctgtccgacgcgtcattaacctttttccttcagaacaaaggcggataacccaccgaacacaaaacaaaagtagcgcataatatgacaaatggccaacataatccgaaaataattgcagatctgaattaaactgtaagatgtgaattgatttcagctcgaagatgtagagagctggaaacaacaatgcgcccctcttgtgacgaggtaaaagagttggatatactgaaaattaactttccctgcctgatcagagagctggggccacggggaaaacagctagcctggaatggagagagaggcccctgcaggggaagcgcgacccccgtgctgacgccggggctccagcaaacaccaggcaaagcaacaaaaagcttcagctggaaccttcaggaactgcccaaggctagggtgggctggcaagagtggaggggcccgggcgctgcagacataggggcttcccaccaggagctcactgggaagagggagcaggccccggagaaagctgctccttggagcagctggcttgggggcaccaggccagcctccctttctgtttcacggagtcaaagcagagggaagaacaacgaagacggcagcagtgtgagggcacggagggaagccccacgccagcctccacccagacgcaccaccctcagccccctcaaatcaggagcccacaggcaggcgggcagctgggggtggaggggcgctgagctgcatgagcacatgaggacgtctggagagaccgagcctaggaacaaagtgtaagagggcctcagatggggccctcgggagttccagtgtttccaggtaaagaggaaaaggaagaatctccaactgaatgggacagagagctgcttctgaggcagtaagaaaagcaagagtattgggggaggatgcagccaccaggcgctaggaacaaaaaacaagtaagactccggccctgcccgcgagatgagggtggtggagtgagaaggaccaaagtgcaggtgtgcttccctttgctcgggactcactggcacggaggccgcatccacctcctcacggccgtggaggggatgcgtgggaggcgcctggacacctacaccaacacaccgtgcactccgccaggtcctctgctctcgccagcccctgggctctctggcctcaggaaagaacccaagtttccatgaaatccctggccttcttcttagtaacacgtttgtgggaaaaactcaggcaaatagaaattgcaaagagaaaaagaaatattatggcattaagattccaatcacctttgtctttgaattctgggtaattcaggatgagtcactgttctttaaaaaataagactacgaattccaaaaattagtatttattttcaagagcagtagcagatgaggacaaagacactgaataactgtcccaatttcagagtacaataaggggggaaggggcaagttatgaaagtgaatataatgcgttcaagagcgatggctctcgaataaaattaattcctgaccacaatgataagtggaagcatccgttatcattaaattgtgaagaagccaaatataatgaaatgccaaatagacatgtttttttttcaccctagtctccagttctgcacaaagaactgaactgattccaacttcccacaggcagtttgtctttcgcctgataaacatgaggcatttcaggcaaaaagaactgcatttttctagggggggacagaagagattctaatgggagctcacgaaactacttgacctgctactaaattgtgtaatgcaaacccagcagcgtccaatggtgacagtgcgcaggggctccgaggggaggactggggagaattctgacccccccaggctacgggatctcccctaccactgcatgtccacatcgcctcttgctctccagctcacctggcacactcctggttaagaccttcctgcctcaacttcgggtggttacacttaccgcctgccatacacaggtaggtgaatctcagatgacactcccaaatctagccaacttaccttcttttattttttgagtcagggtctcactctgtcgcccaggttggcgtgcagtggcacaaacacagctcactacagcctggaactcctgggctcaagcaatcctcccacctcagcctcccaagcccagctcattttgcttaattttttgtagagatggggtcttgttgcactgactggcctccaactcccggactcaagtgatcctcccacctctgcctctcaaatcactgggattacaggtgtgagccactgcacccagccccactcaccttcttaaaacagagtttcccatcataccagccttcttttaaaaagttgtcagcggctctccagtatctttcaatgaagtccaagttacttctggaacttcaggccttccacagcctacctgggcctgccattcccacggggatcccctcctgctcctgggtcatctaagctgtccagaccagcctttattcagggccaccctgtcacctgcatccctgctggtggcatccagctcatctttagtcaggacctgttcaaagaccattcaggccgggtgtggtggctcacacctgtaattccagcactttaggaggccgaggcaggcagatcacctgaggtcaggagtttgagaccagcctgtccaacatgatgaaaccctgtctctactaaaaatacaaaaattagttgggcatggtggtgtgtccctgtaatcccagctactagggaggagaatcacttgaacccaggagatcacttgaacccaggaagttgtagtgagctgagatcacaccactgcactccagcctgggagacagagtgagactccatctcaaaaataaaaattgggccaggcgcggtggcacccgcctgtaatcccagcactttgggaggctgaggtgggtgaatcatgaggtgaagggatcaagactatcctggccaacatggtgaaaccctgtctctactaaaaatacaaaaattagctgggcatggtggtgtgcgcctgtagtcccagctattcggaaggctgagacaggagaatcgcttaagcccgggaggcagaggttgcagtgagctgagatagtgctactgcactccagcctggcaacagtccgagactccatctcaaaaaaataaaattaaaattaaaaagattttaaaagacccttcattcagagttcagaaagcaacaccagatcctcacagccagacagctctcccgtctctgaactcagggtgtggaacactcggcagccttcgcagcgtgccttccgtccctcacttgcttaacgtatgccaagaagctgctctgaccaggcctcactgcatactgggaaaggagagagcacacggcagctacgtgggagactcagggaaggatgagctcgagctctgccaccacaggacatggagggaggggacactcaagggcttgcaggagggaggggccgagtgggttggcagaaaaagagagacggacattccaggtggagggaagagcacagatgaagggcatttcacaaaggccagggtacggcatgcaagggcccagcaacacgaagaggcagacagagagagagagagagagagagagagagggagactgggaccagattacatagagacttagacaccaaagtgaggagcccatttgtttttgagaaaactgtaagacacaccagaagatggattcaagagggccaggctagtgacagcgaaagagttaactaggctcccgtgaaggctcagataaaacgtgtttggcatgtgtaccaaggcaaagagggagagaagatggagggatatttaagagaaagaacagatgagccttggggaagaacggatggaactccagcggtgagagaaccatctgcaacagccccaggactcttgccggcacttcccagcagatgataatggcttttgccaccaaaggaaacacagaaaggtgagcccgtctggagagaatgacaatccatcagagtttgaacaagctgaactggaggtgttttcggggctgccaggtgaaaaagtcaggaagccagctaaaaacattgacatggaattcaagaccggaaatagacatttcagagtcattaccatcatgttagagcctgtgaaatcatttaggaaaaatatagtgtatggtaagtattaaggacaaaactgttaggaacatccatagctggggatgcagcagtgaagcagagtcgggaacagtcagtgtggcacggcacgggccaggggagggaagctccccacctacaggaggactggccagtcactggcgtctcccaaggatgagtaagtggcaaccacggagggggagggaggttaaaagcctgatttcaatggcggaaaagtacaagaaggatgaaaaagtgaaggggaaagagtaaggagtagccagagagaaacccatggtttagaagaggatttgggcatatcggctgagggactggtacaaaactgctcaaagcttagtgcgcagaaccccccagagaatgggtcagaaacacagatcgcagcccagcgcccacagaaagggatgtcgaagagctgggtgggccgaggaatctgcgttttagcaaagacactttgatgcaggtggtccatgggccgtgacctacaaaaacaagggcaagttcaaaagaccaaagagaaaggatacctgatccggaacacaagtcagacgattcacctctgatgagaggaggagcccatcttcctctacaacgaaacagatgggaaaaacaagtgtatcccagaggaaagaggggaagcagagaaggtttctgcctgatggcctctgtggatctttgaaaagagaccatgtgctgagaggaagggatacaagagtggggaaaagccttaaaaaaagtggcatgttgacaacagctgaaactaggcacacacttgcccctgtgttttgatgaatgaatgtttagtgggagagccctatgatacagataagcatattttccccatggtgttcaaattcatgggataaaatgggcactactcaccaaagtcaacctgtccccttctcaagatacaaaagcagcagatgacttaaaggaccaggtttgccgcccactctctattaccctcctctctgacaaagacaggaagattccttacatgaactgctatcatatccccatttttgaaaaaagcaagtctccatttgtccaccagaattgtgacattcacttcccagcaaaccagaagtttataggtaccacaaagatggacctagaaatactgttctgtttgttccctaaggcgggggcccgcaacccctggtggcctgttaggaactgagccgcacagcaggaggtgggtggcagcctagcgagctttgcagcctgagctctgcctcccgtcagctcagcagcggcctcaggttctcacaggagtgcaaactctattgtgacctgtgcacaccaaggatctaggttgcacgctccttatgagaatctaatgcctgatgatctgaggtggaagagtttcaacccaaaaccatccccttgccaccatggtccgcagaaaaactgtcttccacaaaactggtccttggtgccaaagaggttggggaccgctgcccaaagggaaggaaggagtggataacagcaggacaagctccgcagcaggcagggcccctggtgctgctgtgtgaggccttagacaaatcattccaccttcctgggactcaggttcctgttctgtcaaccaaattgattagctgacatctaccgtctcgtctcattctgtgatactagggatcactatttcccatactgaaactgaaatgccacagttaattatcatgtctaacagaaactgtcagcagggaaagttgacatttctcttacaaaaccaaaagccaaaaagtacacagagaaagaaaaccaaattaaataattaattaattgaaaaggaaaccaaagcaggtgatgctttcatcccaccgtcaagaaacggcaacccaaaggcagttttcatgtgacacatcaatcccaataaaatcaaaacactaatttatcaatcttcccgacagctccctgtgctcaaacatgtccctcagacaaagagggcacgtgcagcagcctggctcgatcttctggataattccttcatgaaaaccttcttggataaaataatttttcaatctcatcagatgacaaagctgtctgttacgcagaagtattattactaaggtgtttccaattcctttttttttttttttttttttttttgagacagagtttcgctctgacaccaggctggagtgcagtggcgcaatctcggctcactgcaatctctgctttctgggttcaagcgattatcctgcctcagcctcccgagtacctgggattaaggtgcacgccaccacaccaagctaatttttgtatttttagtagagacggggtttcaccatgttggccaggatggtctcgatctcctgaccccatgattcacccgcctcagcctcccaaagtgctgggattacaggcacgagccaccgcgcctggcctcttcttttaaaaaacactttattgtgaaatacaacactgattgacaaaaccaccaaaaataaaggtatcacttaatgaattattatgaagcaaacaccctagaaaacacgacacaggtccagaagcagaattttaccagccccctagaagccctcgatttgcccatcccaatgctgacgtcctccctcgcccacagggcccaccacccagactttgtgctagtcactgccttgcttctctttgccattttaccacgtaagcatgcagcaatgaaactacagtttagctgtgcctgtttttaaatgcgtcatttaactctctcttaaactacagatagccttttcatctctttgttttgtggtgtgtgtgtgtgtgtgtgtgtgtgtgtctgtaaaatacacataatttaaagtttaccactttaaccatttttaaatgtacggggtcagcagcattaagcacattcacactgttgtacaatcatcaccatcatctatctccagaacttcatgcctttttccccctgataatttacttgttgagagaaccaattcatggactgcagggtttcctggagtctggactgccaactgtgtccccgtggtgtagtttaacaagtttttctgccttctgaagtcctgtaaattagcagttagagccagagcgctgatcagcctcaggtgtgattctgggacactgctaattcacagaaggtgctgtgttctcccagcaggaggaacataatgtgtggttgtctcttattttgttatgtggatgcttactgtctcgactcattaatctattagggatggcaaaatgatgatatccgaattctatcctccttatctccattgttagcccaaatacttctataaagagagactcccctcatcaactggtattagatcgtccaatcgcgcagtctacatgaaaaggcagaataaatactcattgcttaccattttcaaaatgataaatcacttccccatcattttccaagggcgaacaattctctcaagtagcattgagaactcatggactgaaacacagttcgcatctttactgatgctcaaattgccagtggtcacttcttcaggcggagcccttcaacacaacctcaatgctctctaatcactcctttgctgcaagtttgacaagatggtccaagatcaccttcctgctctgtttcctgctccacatctagaactggttatttttctctgagtgagaaagtgtgtttcaagaccaggaggtgggcattaggaatgctcactgctgctggactggtccgtttctagactcggacactgtacaaggctaggagattgatagcttttcaaatagttcatgatttcttgctattttttattcaaattctaaactacaaggtttttacttaacttcatatctgacatcagttacttcctgtcttccatatgagaaccctagttcaaaactagattcagatgatagaatgagattatcacagaattaatcatttactttaccctacactgatacctagtttcagaatatgagtactaacactatctctaccaaaacaattacagagaacagtttaaaaattacttttggggccgggcatggtggctcacacttgtaatcgcccagcactttgggaggccgaggcgggcggatcacctgaggtcaggagtttgagaccagcctggccaacgtggtgaaaccccgtctctcctaaaaatacaaaaattacccaggtgtggtggcatacgcatgtagtcccagctacttgggaggctgaggcaggagaatcacttgaacccgggaagaggaggtggcagtgagctgagatcgtgccactgcactctagcccgggcgatagagccagactttgtctcaaaaaaaaaaaattacttttgcatatgacttcccatgctccccccatgttttaaattattgtgatggatactgtaagagcagattaccatgacatactatcttctccctttgaatgctcatttggtcttagctatacaagcaacgatatgtttaatgttcaccacaagtccttatgacaacgtctctctagttactttggctgtgcttccctagtagaatcctcaagaaatcatgagaatttaattcttccagtcttgcgtgttgacaacaatttgtctaagccctgtatacctaaaagttagtgtggctgtgcctacaaatctctggcttaaattttcattacatgagtagctagacatagtctagatacatgctattctattggcttctggaatactgctgctgtcaaaaagtccaatgataatctgattttctttatttcataaatcacttgctatctgggtctaaaagcccaaaagactttaagtccagtaatataactagaatatgtcccgctcattctaagtcaagattctcatgtatacagtgtacccattcatgcaacagtttcaagggtttttttttttaattacagaaagttttctgtgaattatagtttttaacatgttgtggttccattgtttccgtttccttctctggtgtctcatagcagatatatgtatgtatatatgtatgcatgcatgcatgtacgttagatcttctttgcctagcttctaagtgtgtcactttctctttaatcatctttctctcgattcttttttcttctctcttttcatcttctgcttcccttaatgtatctggcaggtatatataactcactagaaactacaatgctggaaaaaaaaatttattctattacaaattctttcctgagttatatccatctcatctctgagtttttctcattcagatttatgttattcttttgtacttcttcttcatgtcttttagctcattatgggtttttgtaatttttatcagcttctgagcacgttcttctatgttatctcgctgcttatgttttcactagaatcactctgcatagagtttggccatgatccttttctgttgaccatctttacatgaaactagttttcatgaatgtttaggagaaatgattcaggatagctcttctaattctagtaaatctacacactgtattctgtgtttgggggtggtactcaagaatataagaaattactttctagaccacttaactctgttctcctcccctagtttcagccagatcttctctttccttgcttctgctatcccacctctgttcccagcagcttctccacaggtgaggctttgttctagaggaattatttgcactcatctgctactggaacatacaaactcctccacatttcagctgctgttctcaacttggcccactgagctgcccaatgagtacctgctggctgtgtggggattcctgggtgtgtgtgtttccggcttcctcttgtgcagacggtgaaaccgtgttgttattagtggtttgtccacatctacttatattttggggtccgtggggatactctggtaactggttttgctatatatttttgcctatgggtatttggtttttctattctagttgttcagtctgtttgactgaatagttcatatattcaaaacctaagacagtttgccaccatcttccaggacttctaattttaaacataaaattccaagaaatcagagatttcaagtattataaggatcataggaaaagaatatactattttgtgggtgaaaagttgacttctcttaccctaggctagttatatgaagaagatagatatctgccaagaatttgaagataaggtaaataatttgctttctgatgtttcatttagaaacaatttctaaaattcacttagaaatcaaaataatacatccaaacagtgctctacaaaatctttttcttgttactattttgaaaaatatcgagcctacagaaaagtcacaagaaatgaagatctatatctctttatctaaagccaacttttttttgtaatttcaacttttattttagatttagcgggtacgtgttcaggtttgttacatgagtatactgtgtgatgctgaggtttgggaaatgagtgattctgtcatccggacagtgagcgtgctgcccaacaactggtttttccctccctgacccctcactccctgccttctcgagtagcccccgtgtctgttgctgccacctttatgtctgtgaggactcaatgcatacctcccacttatatgtgagaatatgctgtatttgcttttctattcctgcattcattggtttaggataatggcttccagatgcatccacgttgctgcaaaggccatgatttcattctgttctatggctgcatagtcttccagggtgtatatgtaccacattttctttatccaattcactactgatggccacttaggtcgattccacatatttggtattgtaaatagttaaagacacttctttttaataatttgacatttttactttatttctctctagattcacattcacactgtattttttttccttcaccctattaaagtaagtgcaggcaaatcatctttcactcttttttttttttttttttttttttgagatggagtctcgctctgtcacccaggctggagggcagtggcgcgatctcggctcactgcaagctccgcctcccgggttcacgccattctcccacctcagcctcccaagtagctgggactacaggcacccgccaccacgcccggctaatttttgtttttgtatttttagtagagacggggtttcaccatgttagccaggatggtctcaatctcctgacctcgtgatccgcccacctcggcctcccaaagtgctgggattacaggcgtgagccaccgtgcctggcctgatctttcactcttaaatgcttctgcatttatttcctaagaacaagaattttctgctacaatttcaatttcattatcatactcgatatatttgtcattgatacaataatattatagtattcaatttcttcaattgtcccaaaacaaagtcttcttttttaaatccaggatacaattaaggatcatgcacggcatttgattgttacagctcttcaatctcctttaatctagaacattcttcccacttgcgtttataaaatgggaattacaacatttactttatagagtttttacaaagattaaatagaaataatgccagaaaaaaagtggctagcccagtctttatacacaacatgtgacaatgctcagtaaacattaattatcttccagctatctatggccgacactgaatccaggatcccggtttgtgcaacagctatccaggttgctgtgaattttttaagcgtcatttaacttcagtaaccataattaatgcgagtccatgcctgagaatcaaattggatccacacgtggtcccccattagatgtctctgagaatgttagactgtgagctacagggggtcgtctcccagttcccagaggccacaaatgagcctctgccactgagttcacagccacttcacataagggcgccgtgattgtctcgtgcttcctcagactgaactgcacgtaacaaggcagcctccatggaccaagctctgggtggttcttcgtgcctaccttttcctccataaaacttgacctggtttcctggtttttctaaggtaaaacttaccttagagatttgctgtctctttctgccacatactatgtaaacaaccagccagagcttctattaactgttattaataaagggggcatctcatgagtaaccactacgtgccatgaccagcaatcaggccagcctcacatttacaaaccacctggtgaccataattcaaggcctgatttggttttgttttaaaagatagaagaaggtattcccaggctacaagtcccaaattgcaattttgctcaatttttctctctgaccttagaagggcagagagactgccctagtcccctctataacaaaaggcagaagcacagtcataacaggacaaaataggtctgcactgaacatgcaaattcaaacaaccaagcacaaaaagccaagccttccacatggaagccttccacactgttcctcaggaataagacgaccctggcaggccatgggagaaaccacggtcaccattccctcactgctagcctggagtccacgtgccaagacatagccctggggtaatatccagtcccaagtgttccaggggcaggtgctgggcaccatttattctgccaaacccccttcttgggaagaagaagtcagaacctatgtaaccctctgtctactgattaaaaagaaaaaatgcagttcagcgggataaagccgtttacacaccaaccaaaaaaatccgtgtcatcagacatttttaagtcttggtataatttgaaatcctctcaacttttttcattttctaatgtatccaaccctaaatctgtttttctacatttgttaataatataaaaagaatattttaccaaataccagcactatacaagaagctcatgctgactatttgaactgcagagggtgcagacagcaaactctatggagggcgtctgttagggactgagctgcgtcccccttccccagctgcatctactgaaggcctatcccccagtgggacagctttaggaggtggggcctttgggaggtaattagggttagatgaagcaatggagatggagccccctctatgagatgagtgcccttgtaagaaggggtggacaccagagctccctctctcctccacgtggagacgcagcacgaaggtggccatctgcaagccaggaagagggccctccctcaccagaaaatcaccacggctgacagtctgatctcagactcccagtctccagagctatgaggaaataaatcttggttgtttaagctgttctgtctgtggtattttgttaggggagcctgagttgactgaaagactccacactgcctccaaatgaatgcttcataatttggcataattaatttatgaaatcttttttttttttttgagatggagtctcactgtgttgcccaggctggagtgcagtggcgtgatctcgactcactgcaacctccgcctcccaggttcaagcgattctcctgccctcagcctcctgagtagctgggattacaggcatgcgccaccatgcccgacgaatttttgtattgttaatagagacaggatttcaccatgttgtccaggctggtctgaaagtcctggcctcaggtgatccgcccgccctggcctcccagagtgctgagattataggtgtgagccatcacacccagccaatctatgaaatcttatctctaatcagtcctaatgttacaacaaatataaatttccatttcttccacactccacctccttatagatatcatcagactttgaaggaaaactttatcatcacagctaattagatgtctaaagaatcacagcagttatacttgaaaaaacgcagtaattcctacattccactaatttagaatgacctgctggtaaatgagtacaaaataataaagagtgagaattaaatcatttagataaaaagtacttttattactttcagacacatacagtaacacactctgttaacaaagtgcccaggagatgtctcaggcagcttgagttaatgaatgacaagtgagttacaaacagcaaacagcaggcatcaagggatgggggttgctacacagtatctaggaccctgacgtgctaattaaaattaggaaagcgcttaccatcactgagatcctgcaggagattctcctggcaggagaaatccagcttcactttgatgttgattgtgaacgtggccaccttcccaggctgcaaagggaactgggcaagggtttcctctagcttccagctcaagaagtcgccatacaatttttctgtaataataacaatgacagtgatgaggatgctgtaactgaggcagtatgggacttaccaatcccctagaaaattctgatgcattctcaaaagccaaggaaaaagaagagcttttaaaatgtgtaagatcaaagtgacaagaacattccagaaccaagaagtgttgcaaggcaatcacccctgtttatgaaggaggcacagggaggaggaagaactgctcatctctagaggcaccgagctcaagccaagccatcttgacgccttagtgagcaactccttctcattgaccaaataaatgccgttttgctcttataaactaaatcagagttaaactaaatttctccacaatgaatattttctgtattatatcaccttaaagagaaacagatccaagtgtagtagggaaagtgtatatttaatatgagacacctcttcacaaaaagagaataaaaaatcaaaacccaagcaggacgctgtggctcacacttataatcccagcactttgaaaggctgaggcagggtgaatcacttgagatcaggagttccagtccagcctggacaacatggtgaaaccccatctctacaaaaaaatacaaaatttagccagtgtggcagcgcgcctctgtaatcccagctactcgggaggctgaggcaggagaatcgcttgaacccggcaggcagaggttgcaatgagccaagatcatgccactgcactccagcctgggcaacagagcaagactccatctcaaaagaaaaaaaaaacatcaaatcaaagaattaaggacggcaccttgggaagggcctccggggagaggtgtttcccttgctttctggcaaatacaccatggtctttaataaaaagtcttgaatgttagagtcacatggccttgactttggtgcctttttgacactgactaactcgagtgccatggagaataatgatcccttggagtcaaggtttcttcgtgtgtaaaatggggataacaattactgcaccacagggttattttacagattcaataaagtactatctgtaaaagcaccaagaagaccacagcactgtaagaacctcaggcaacacgggaggaagggggacaggaaggggacatggggaggccactgctggtgcccgctgaagtagctgcgtctctccacggctccagttcctaaaacccaggcacagtatgatatgctgccttgacatccggcaaaactgggagggccccaaacggcctcaccacaagtcccctcctgactctgctcctgcagatacagggtccctcagccaggcaggtttccaggtgcggaaagcaggtgcagccctgtgtatcctgggcagtgggtgtcagttccctgccagcctggaagggactgaaataagccagtcacatcctccctggggagccgggggcagccctccctctccataccccaaagcccgcctcccccagcccctgggcagctgctctctctgttcctgagtgcagcccacatggccctacgtggcatggtatcctccttccccagctgtgagtgtctgtgaccaatgaactgctgtcaggtgcacatgccctgtgcacatgctaggtctctggctgtccccacatggtagaacaagaaaccctcctgaccaacacaggggacaggaagccatgagcacggggccctcctcctcccaggaagggcccagcttccaggctctgcaaaggtcctcctcctggtgcccctccagcctaggaggcaggagcgacttgctgttttcccactatcccctttctgggaaccagttttttatgctgaacgtcttcggtctgaataaggagacggttttagagagatgaagtaacttatccatggtcaccaactatggaatcagtctagaatcctagatccaaatgattccaaagtcacattcacttcctgcatgaagacatttcatggtgaagttcaaatgtaaagtcctggtcggaagacccagaagtgaacctcacaggagctcaggggaagacggagagcttgaccaaaatccccatgaaagaaaaaagatacgtggtgtgctaactccagaacacgaggacaaactgagctgcaaaataagcagacatattcctggccggaggtgtgctcgaccatggcacggtcctgcagaactggccaagctccctctggagcacgtctgacagacggcgtttatgtctccatgtttccttaaagaaggatactaacacagagagacagatccaggggacagcgtccttgaaaagtgtttagaaaccacatcacattcatttatttacttagtcattcacagaacacctcaaatgtgccagacactccacgtgttacctcacttaatcctcccaacaaccagtgaaatcatggaaggaggttagcatatgtaacaggtcattcagctgtcagtggaagacttggcatattatacatgtttgataaatattagctgcccttcagcatcacccagtccaccaccttggatggtgttcagatgctttgcaaactgatactatcacagtattttagaatgatctgggaaaagacagatggctgggaaaaggatgatggaatcgttgagcaggctggttcctggaaagtcaactttaacgacagtctgaggaatgaatccctacattcagatgatttcgagaagctgtggaccgggcgcagtgactcacacctgtaatcccagcactttgggaggccaaggcgggcagatcacctgaggccaggcgttcgaggccagcctgggcaacagggtgaaaccctgtctctactaaaaatacaaaaattagctgggcatggtggcgcacacctgtagtcctggctattcaggagcccaaggcatgagagtcacttgacccagggaggtggaggttgcagtgagtcaaggtcgcgccactacactccagcctgggcaacaaagcgagactccgtccccaaaacagaagaagctgtggctgttggatgagattcttataggaatttagtgaaagggaaatggagaattggaggaaagtattatccaaaactcaaagtgggagatggaatgggtcaacaagaatcacctaaagtcaaagaaagtgaatcatatccaattatagccactctaattacaggataaaaatctaaacacttcagtcaagctttgggggcaaagggtacaaaacactggtcgctttggtatttcatgatgacaacaggctactgaattctctgtctggaaacccgcttcaacacacaacatttggcccttggctgctcaggggaatgtgtggatactcacatatatgatttatcctttagacggtaagtcactcagtcagagaaagaacaaagatctgtctccaaatgggaaaagaacttcaaagccatcttacaggtgagaaagcagaaggaaaaggagagtctgacacaaaatcacatcatcaattgggtcgcagctttcttcccactccttcagaagggttctgacgacatcttggctcattagtaaggaaggtaactgactttcttccttcccacctgctctctcaagccatgccagttctctgcctactcgatgtgacctcctccacgcaggacccccgggcaggcccacctgcttccgcttggttgccattctatgtgtattctgagaatctaccctcccacaagacgctggagttcctttccactgtgctcttctgtaggtgccgacacatctgtgggcagctgcagaagctgtggttaaacacaactgaaactacaggcctgggttcaaaccccagatccccaccttcctagcttgccattggctgtgttacttttctggggtctcagcttccccttcttttacaagtaaagcagggagaaatacctgtacctactttctagggctgctgtgagggttagcgggtttaaaacatatagagtacttaggacagggcacggtgcccagtgagtctcagttaagtgtttgctcttataattattcaggtttggcaagaacaccaccaccaatgatgggggctcgtagccttccatgtctactacttcctgctacttccattacagaacagtcccagtaagtgttcaggtgtctgagctctccctctgtgccaggcactgtctgaagttcatatgctaaggccagaggaggcatgagtctccgccatagtgcagagtagttagcttacagcatacccttagctcctcccaaaatctccatatgccagcattatccacatcatatgaatgagcaaactagagttcagagagatcaagcagctttcctaagggtacaaagctaggatgtcccagagtcaagaggtgaaccctggccctcacacccattcaccgtgcctcagtcctctggcagctcagaacgcagttgctgcctcttctccacgcagcagtgctggcactggcctgggcctcttctgcgctgagccaacctgtccaccttccttctacttctcctccaatggcactcggaggtgccatcctgacgacactactttagacccaccttggtttgaaaagaagcctccccagacaggagcccaggagtgggaaaaaggaccccgtgccatgcgagcgcacaggggagggaggaaagaagcacacgtcctttcagaagttgacatctggtgacacctccaatagactcctagcatggggggtccctgaatatgccgaatgctttcttaagtccagaactctgccccatcgtgtgcctactactggaaatgtcttcccctaccttctctgcctggctggattttctagagctttttaatacccaggtccagggtatctactcagatatgcaaccatcccagcccttgttcttaggctggaagccctcccgccatgcctgcaaacacctgcacatgcctccaggacaggctccagcactctgcacccaactgtgtgagctgatctttctgtttgtagctctcactgggatgtgcatgtgaggagaactgcatcactgtcctttggcaaagtaagtagtcattcttcagataaatatttattgagtgtctcctgtgtgtcaagctctgtagcaagcacaaaaaaacacaccagtgggcaaacaggccagtgaccgctctcccagggctcatggtctgacagaggaggcagaaattaggcagaaaactagacacaagacaacaaagtatgtcatgaccaggtcagtctgtcttgggtacacgacagcacacgacagacaagtctggagggccagagaaactccccggagagaccgccattcagacacggcctgagggagcaggagggcttgggcaggttcaaaagagggagggtgaccctgtgcgactaattctggacttgttctccgcgttcacacgctccctggcacaagtaatggatttgacatttcactcaaaactcctcacacacacggctgttgccatcttcttcctctataataatctatagaacataaagattttagatgtttgctgataattcttttgttcttgaagcacatggcactaacctagtctggaaacacaattaaactttacaaattttcctgatctctcacctaaactgcactccagaaattcaaaccgcctgctagatacattctctaggggttttgccagcacctgaccccaaaatggaagctatcgctttcccttccaaaccatttacagcaccaagatcctcctgatgacccaggaacttaacattatataaatatgcacccagtagattcataaatggcattttgtctttctttttcgatccagtcaatcaattcaggatagaatgggataagagaggccaggccacatgaaaccagtgcagaaaaccaatggggcctgcttgctgggggccagggcccaaggcctcaagaacattggaagtgtgtgccaacttctttaaatggcctatcccagggctgcaggggtcctggccaacctccccgtgaaccgccaatacagctgagatactgaggccctgtaagagcctcccctcccaagtgtcctgtcagaccatttctgaaacacgggccccaagaaccagccgcccctttgggtcctgccctgtggcagctcagcccaccccgcggaggaagcagcagagggctctcaggctcatctccggctgcaatggcacataacagcaacatcgtgggatgggcacccaggaatcccctctcacggctgctctccttccccgctcttcacccctgtgccctagttacccgcctgcacacaccactccctctgccaggaatgccccgctcactttcccaaatacagaaactctatgcgtccttcacaagccaacttggaggctcctttcctgtgatgccttcccatcccacatcactgctctgggctccaacacacacgcctctagtggaacaccatccaggtaccaagcagctcattcttccaccaaacggtcaaaaacggaaggcagggaccagaccttgcctttgaacctcaccaccttgggaggcagggtgtgtgctagttacaaaccccagcttcaggacaaagggccctgggttcagatcctggctccggccggctatccttcgataagttaccaaagttctgtgtatcttagtttactcatctataaaatgggtcgtcatgcagaatcaacaagttgacggaagtcaaatgcttacaatagcgcccagcttagaataagtactcaaccaatgctagttattcctcccactcctcaagccccagtttccttctcctaaccggacaatcttcacaaccctttatcagagctgtgtggacgaagtgattcctgagagtgtctaaccctgtccctggcattcagtgagtgcacgttagggttagctgccatcagcaccccttcccatgcaatggctcacagggcctggccaccagcaggcactcaacagtgcatgaggcagaacacacacgtgtgcccagacatcacgcttagaacagacggaaaagagctatgtgaaaaaagcggaataccacagtgaatatacgattaattccaactacatgaaaacactgacatcgaaaaagaaaacgaagacctgcctatctgctcttattggttgtccttgagtcatgagatcatgggtagtttcaaattgttttatatttttttgaatttttgacgataagtatacattacgcttttataaacaaacatatacacgctcacacctatacacacacatgcacggatataaaaccatgctaacatttcactcgagtcgaagctcaccaccctaccaccaccctccaatttagtatagagagaagccccacggatctggcctgcaaatccacgtgcaagactgatcttgctaaggcccgtggctcgagagtgaagtgggttctgagccaatggtgatgctttctatggtgtcctacaagagggccagggaatcatgtgaactggtgagaaggacaacaatcaaatggggcatgtttatcactgttgaagtccccagactcaactctgccagctgaataaagttctctgaggtggtggatgaactctgtcgcagccatgcaaattggaaggtgatcaaatgcctagaaaaaatttgcccaggctaatgaaaaccactagtgcaaactaattaggtaagttctacctctcctttctactacctgtgctaacatagcatggaagggccactctggaggaaggaggaaggagaacacaagacaataactgaaacaaccatctattaagtcctatcttctgacttcacattacagctacattgtccacatgtgtattaaagaggcaactaaaagtcagagagtttaagcaacttacccaaagcccaacagctaataagtaacagaaccaagagtcagatccagcactggcaaagaccaatctgcctctcaccccttatctgaacccatgaacccaaccagcatcatcaccaggcggaaagcacacacaaggagaggctcatgaaggtgaagggagagagtactttgaaaagatatggcagaaaagaaaatataatggccaagcacatgagctctagggtcagacacacgtgaatctgggtcctaatactgccatcttaccagctctttgaacatgggcagtcacatgtcctctgtcatcccaagacgccctgtcagtacatggagaccatgttagaggtgatgtggagacagaatgagacagcataaggactttctgcggcacctggcacacagaacccgcctaggtcatgtgcatgaaagtcctctgtctgctctgcagcactgtgatgagacttggtttttacattctattgctgcccatttcattcattcaatggacacttactgcacagccttaaaatatcctcatggcaggcgctatgctaggttctggggacagagataaagaagatgtagcccctgccctctggggaggttgtctctgattgtaggaagaaatggtatcggggctacaggagaagcccctgaaagctgggaccagatgagagatcaggcttctctctatctgaaaatttctgtaaagtttataataccattacacatagaacaggttcaacaactgcttgctgaattaattgcccaagccagggtagcatataactgaaataagacttgctgtcctagtagctggaagtaaaaggtgaacctgctagggtcccagacctctataaaatatctcattctttcagctctcagtctagcgtatcaggagtgtacaactaaattcaaaaactataattatagcactattcttgcctgttgggatggcttttcttttcttaaacgtgcttcaactgagagacgaaccctgtcaaaatggactgtgaatgcccgcccaccaggcttccccatagtcatggctgcaggatgcgtcagacacccagatcaggaggagtggcttgtaatggagacatgaaactaaagaaataccacctgcccaacacaacctggaaggaagagaagggggaggagacaaacatttagcatactagttactgttacttaaatcaccatcaccagccatctaagctctatggagtactcccgtaaaacaggtactaagacctgtacgtctattgtctcattaaatccacacactgattctctgaataggtcctgctatcacacccattttagggaagctactcaggccatgcagaagtgggtatagccaggattcaacactctgctctacaacctaccccttagtaagttcactggcttaatcctgaaagcctgtgaaatcatgctgtagttctattttaagaagtgcacttttttcctcatttttttttacagagacgtgacataccaaagaccccaaacaactaagtgggagtttgattttcaggagctcccaagtggcaggccagacaccttcatcccctcagccctccctgagttctttatttcccatccatgctcccgaggcgttgaacatgacaggtctcacagaactgattaaaaggcatttcactttgtcttaagatcagcttattttgtaaacttctccagcgtgaccctagaaatgtgtaaaatgctgaaccgtaccagaaagccgctgcaattgtgtatacggtgggggggggcagcaagttgaatgacttttagtcattcaggaatttcaatgtctttctaggagacacaccagtaaattcactcactgtggttagtcaacatgcagtagaaataatacaggatgtgcagtcggaattcagttcaattcagtgcacatgtctgcctcctacactgagccgtgagctctcaggacagggttcatgcattattcatgtgcctgcacggtgactggcatgtcaatgtgatgtaaatgtttgattgttgaataatacaaagccaagtgaggtaagtgttattgtaacagaatataagcaaggcaatggacggtagaagtggcataattaattctacttgaagggctcgggaaagctttcaggaggtggcagtggacggaactgcaaatgagggacagacttggggatgcacagaggacatctgggagtgagcaaagttccaaatacataaaagtgtgttcaaagacagctgcagcacaagggctgtggcagaacattctgcactccccagggcagagccctcggtagcactcagcccggtgtccccagtgcccgatacgatggccaccatgtaggaagtgctcagtacgggctgctgaggagtccagcaaaggcaagagcagctggcagccatgaagacagacaggtgagcaccagagggagcaaccactccaaaaaagagcagagaggacgatccctctgctgcccccgccctgcccactgctatcacgggacaccttgcacctgtttaccattgagcctcccattactctcagagctccgggaggacagggatgactgtggtcctgctccccaaggcacaacacctgaagcacagtgggtactggggaaatgtgcaagaaagaaagggaaggaaaaaggtgggcagccagccatgggatggatttccctgaacgctgggctaagaaactagggataggaaaataatttcaacatgttttagaaaggtgacaaatgagttgacatttttataaggtgacaatggcagcagcatcaaagataacagtaccttacaggaggaactaggatttaccaagctctaactaatgccaggtactgtattaagtgccttgcatgtagtataacaaccagaagagccatggagtgccagctccactaggaggggacaatggtcacagacacaagtaacttggtccaggtcacccagccagtaggtggcaaagccaggactctaacaaaagtccatctgatcctaaatattataacgttgaccatcataagtaacttgaaaattgagggaggcctgacctagaggcttccgactagtctgctggcctggctacccggagccggctgctgcagctgtcctcagctccatctctacctctgtccacgccgagatatgcaagtgggacttgatgtgaaaactgaagcagagatcagaggaactgaatcctttcccccgctccccaagacactccactctatgacaataccaagaagtagaagccacttttctccgagactgatttctaaaattttgccctgccttgccgtgattatttttaagaaaagaattatgtaaaaatagcctaataaaagcacctcggaaacagaccagaccagaaagttagaaagcccagcagggtgggtagctctcatatggcacttcagccagctcattaccgaacccctcgggtcctgagaattgcacgagtaacaggtttccctttgtcagcaggagccaatcgtctcctccccgtcagcgctgcctgtggcctcccaaggtgcttctcgcactcttgcctttcccaggtgctccccatggcctcccaaggtgcttcttacactcttgctttcccggcttccttccatgtgttatgagcaggccttatgctgactctactaaatggcttctggtttggatttgctatggttttaatgaaagtatacctttattcacccggggaattgttacatttcaccatcccagaaagtctgagaacaaggggaaagctaagacagtttctgaatcatcctagaaaaaaaacggggcgggggaaagaagagagagagaggagggggagggggaagggagagagagagagagcggagggggagggcaggggagagagagagatggacccaggaaatgtagacaaaggcacctgacttcctcaagcggggcatgcctttgcttatttcaagtcagccttaacaatttggatgttctggttttccaggccctggcagaccaaggaagccaaaccatcagtcttgggactgcaactaaacagctactcctaccccacccaccctgtgctaagcactgtgttaggtcctccagagacaggagcgtgtgttctgggatgaccacgtgagagagggactggatcctggtaagtatccagacgagaacaccaagcctccagcactcagtcaacttgctcaagacaagtcataaagctaaacaatacgagacgccaaaacccgtgttctcgtcatcacgccagctgaacagagactgtgctggacaacccgaagcgacagaggcaacgagcaacagcaacacccacgaaagggagaggaaaaccacacagaaaccaggagggcaacaggccggcctattccacatacacagaagcagcagagtgcaagagattcgacgctgccaccccaggccgcgcccaggccagtaactgaagaatgttcaaagtcccaccttcagaatgctactatttccaagcataaggtatgctcagaagatgtctaaccacactgcttatttgtgtattaagttctgtagcttaagagtgacgtattcaaataacaagcaaatccacacacatgggaacagcttattcccctctgatgccaaccaaccaaggtatttatagctaagaaataagagaggaaattcacagtgcagagatgatttttctatagccacagcactatggaaagctgaatagcttggtcgtccgatttaatatgtgtttgcacctcaaaagtgggcctgttttccccatccttcctgtggcacagaactgggtgtctgaaggggctctgcagaatcctacacagtaatatgctgcaggaataacaagagagccatcgattaacagtggaacatctgtcaccaatttctttcccctgtgaaatttcatttcagaaataatagtcattatttaaatgctagcatttaggtaagggctatcaggtgaaattggttactttacgttgataataacagaggaattactgccgctgtgaacttgagacatgtaagaagccattaatattagctcctaactccagggatgctgtggtacaacattcatgagaaaagcaataaagagaatctcgcctcaaaacatttatgaatttttaattataacaatacggagccatcattttttgttaaaatattaaacagaagaatgaagaaattaagcggtgtgaacgtgcatttatgtatacaggtatgtatatgtttctatttgtatcacactcatatacacatatctgtgaacatttctggaaaagctaatatagtcaatgtttcttaatttcagctttattacaatgaaatctatgactaagcaaaagcaagagttcacctctttcacaatctacacataaaaacttgcttacaagtggccaggcatggtgggtcacgcctgtaatacaggactttgggaggctgaggcggacagagtatttgggcttaggagttcaagaccagcctggccaacatggtgaaactctgcctctactaaaaatacaaaagaaaaaaattagccgggtgtggtggctcatacctggagtcccagctacttggaacgctaaggcaggagaatcgcttaaacctgggaggtggaggttgcagtgagccgaggttgtaccactgcactccagcctgggcgacagagtgagactctgtctaacaagacaaaaaaaaaaaaaacttgcttacacgtgaattcaaactagaagaattacatgacatcgctagaccctccttgtccagaaatggggtgggttataaactcatctctgtggccgggtgcagtggctcatgcctgtaatcccagcactttgggaggccaaggcgggtggattacgaggtcaggagacagagactatcctggctaacatggtgcaaacccatctctactaaaaaatacaaaaacattagccgggcgtggtggtgggtgcctgtagtcccagctactcgggaggctgaggcaggagaatggtgtgaacccgggaggcggagcttgcagtgagccgagatcgcgccactgcactccagcctgggcgacagagcgagactccatctcaacaacaacaaaaaaaaacccactcatctctgtgttaggaatttgtgaacacagggacacactcaccccataaaagccccaacgacagtctagacccctgagagacccacaaaggtctgtctgacccttaatatcatggatctttaccataaacttaaaatgcaggggattttaaagggagtctgtaatagtaagaattaaaataagtcaggaaagcgaagatgagaggagaaaacaaagcaagaaacttctttatctgaagattgatgtctgaagaaaaagcggtttattctgagggagtgaagatgtgtgcagagactagagggggcccctcatgggactcttggtgcctcccaggtgtcagggatggaaggaaaaggaaaaggggaaggacaatttgtagggtccacaggcaggctcctgcaggcaccaggcaccggcatgcaaacgtggtctgcagaaatgatgcacacaccaagaacaactgctatctgtaaagcaaacaagctcgacgttgtcccaagagctttccccatcctgcgttaacatttcacgctcaccacaaccctatgcagcgggtaagagtgtcaatactacgtaagcactcactatgcggcaagcattgctcttagttcttagctgctaaggatgcagcagtgaaataaacagacgaccaccaccgcccacccaaaaagacctcttacacttggtgtgattatttcatcagaaaaaactccatgaagtaccactcacctggtatgtggagagcgctaagagtaaaagctattcttttggggtttttcgttgttgttgttgttgttgtttgagatggagtctcactctgtcacccaggctgcagtgcaatggcacgatctcagctcacagcaacctctgcctcctgggttcaagcgattctcctgcctcagcctctcaagtagctgggattacaggtgcccaccaccaagcacagccaatttttgtattttttagtagagatggggtttcaccatattggccaggctggtcttgaactcctggccttgtgatccacctgcctcggcctcccaaagtgctggaattacaggcgtgagccaccacacccagctgagtaaaagctattcgtagtactgagatataaaataactctatcaaagtacaaagagaatcatatgggaacccaaagaagggggtttttcatctcgtgtggcaaaattttatacagcagacattttagagacagttaaagaagctaagctcaatgggctcagaataaggataacttaaaaataaaaatcaatccacaaccaagtcctatgctgtctcctatagttaacatccacaaccaaatcctatactttctcctatagttaacatccataaccgagtcctatactgtctctgctccgcctccctcaccctccccaccaccagaggcttctgctcatactcccatgtcctctgagcaggtcctctgttcattcatgctggcagcttttggtgctgtaggactaaagtgacaggaattactccctttgtgtattttggaaacagatggtttgttttcattaatgtaattccacatgtaaatgtaccgcagcttggaacaagaattaaaaaagaatgatagctttcatttttcacgtgtaaccctgttgctttgaaaatggctctaccatgccgtctatttacgtttatcatgattacaggtaaagtcacaagagctgggaaggaggaggcctttgtttttatgccggctcctcgtgcagctgacctgtgacctgaggctggccacccacctcttctgctttcactttccctgtgcataaagccagggtggccctatgtgccctgcgcatcctcagactgactggggacccgactggagagaaccacagaaaaccacacaataacaaagacagacgaagtgtaggcaaggcatgacgggtgactacacttgagggctggggagagaagacgaccatgttgacggtctcggcatgaaccaccgccaaaagcatctcccttggaattctgtcccgctgccacagtgctccccaccttctacatcaacgcttggaagtgctctctaggccgaccaggtaaatggaaagtgtggcttgccccggggctggggcagggattggctgggaaggaacatgtgggaattttctggggtggcggaaacgttctatatcctgataagggtttgcgttagacagatccatgtatttctaaacctcactaaatggtacacgagatttgcacatgtcactgtacatgtattttaccaaaaaaaagtgaactctagttaatggtacatgtgctacagcatttaggggtaaaatatactgaaaactgcaacttactttaaactgcattaaaaaaaaataagatggatttggccaggtgcagtggctcatgcctgtaatcccagcactttgggagactgaggcgggcagatcacgaggtcaggagatcaagaccatcctggctaacacggtgaaaccctgtctctactaaaaatacaaaaaattagctgggcgtggtggcaggtgcctggagtcccagctactcgggaggctgaggcaggagaatggcgtgaacccgggaggcggagtttgcagtgagccaagatcgcaccactgcactccagcctgggtgacagagcaagactctgtctcaaaaaataaaataaaataaataaataaataaataaataaataaataaataagatggattaaaggatggataggaggctggatagatatgtaataaggcaaatataacaaaatgttcattacagtacctagatggtttgtatgtaagtgtttgctataaaattctttcaactcttctgcatggttcagtattcttataataaaagtttgaggatggaatgatggttgatacagaacaagttccagatgaagtcagagacataaggaacaccaaggatggtcgggcacggtcgctcgtgcctgtaatcccagcactttggaaggccaaggtggatggatcacttgaggtcaggagttcaagaccagcctggccaacttggtgaaagtacatctctactaaaaatacaaaaaattagccaggcatggtggcaggcacctgtaatcccagttactcaggaggctgaggcaggagaatctcttgaacctgggaggcggaggttgcagcaagccaagaccacgccactgcactccagcctgggcaacagagcgagactccatctcaaaaaaaaaaagagaaacaccaaaggctaaggtagcctagaaaggtgggacagaagctggaccttgagatgagacctcagatgaccaagaagcagaggaaggcctctccgggaagggggcggtgtctaaggtagagcagcagaggcagtgacctgcacagagcaggcgtggagaggggagcatctaaggcagagccgtgccgcacattcaaaatcgcacagtggttcccacacgcttgtctacgtcctccactcagccaacaggagagaaaggcatgctcccatcagcctcattctcgaaatgcggctgatagggccatgccaccaaatgtctttccgtcaccaattactcggtactgagcacctgctatgtgccaggccctggaaatagaagagaaaacccagtcactgccttggagagaccataccctgattagagaaagagaccaataaagaagccatcaccatacacagtggcaagacctcctgtggcactaagtcagagcagcctgaggcagcaaaggagacccaggagcccaggcttaggcaggctttccagaaagggcagccaagccagagcccagaggataaatgctccggagctgaggaggcaggaggggtgggagaagtcagcatggcgtgcccggggaggaaagggtgtgtctatggcagatggcaggagcatccaggaagccaaaattagctcctgacagcaatgcgactccagctgaagaggagaggtggccatagatgaagccaagcatggggcagaggctgggccacacagggccgcgggggccagggcgacagcagccactcatggatttctgaagacagaagcaggtgaagacttttgcttcagaaagaaagggggattttgtaatgaataatgggcacacgattaccacagagtttatttgaggtaaggaaaaaatgttttccagttgctaagctgggagggcaagttaaattacaggagatgtgagaaaagtttgccacgtagactgtaattttctgtaattcaatattagcttgcttgttcaagtatcaaccaaactctataaccaattaattaagttcagagtaccagatgaaggattttatgccagagaagcactttctacctcacccaaattggtcccaaaaggagggtgggtaggaaagcatgaaattaaggtagtatcattaaatttctcaaagactatacaaagtttttaaaataagacacaaataaacaacatttttaaaagaaaaaatgattaaatgaaccacattaaagttaagaacttctgttcatccaaagccaccactaagaggtaaaggcaaacaaatcatagtatgggagaggatggtcacgccacgcgtccaacaaagagctcacaccaagggtatacataaagaagtcctccaagtcaggagagatggggaaggggagggagaaacagagatagagacagagagagagaagacaaccaatgggggaaaaaagggcaaagtcctcatacaaaagaggatatacgagtggccagaacattggaaaagtgctcaacttcaccaatcatcggggaaaagcaaattgaaacccgaatgctacaccattatatacctcactctcaccactctcatctcaagaatgaataacatgagtgcaaacaccaagtaaaggcaggtgaaatgaatctatgccattagaagtcaaacagtggtagccttaggcagagaagtggctagacatctgatgcacaaaacttcaatcctcatgacaactctacaaagtggtggtgtctgtggcaatagcaatagtggcagtggtggtggtggtagtgatggtggtagtggtagcagcagtgatggtgatggtgcttgtgaggatggcagtaatggtggtggtggtggtggtagtgatggtggtgacgggtgatggtggcagtggtaatggtggtggttgtggtggttatggtagtgatggtgatgatggtggtggttgtgttgatgatgaggtgattgtggtggtggcaatggtgatggtggcgatggtgatggtgatggtggtagcagtgatggcagtggttatagtggtggtggttatggtggtgatggtggcagtggtgagggtggtggttgtgttgatagtggtagtggtgggggtgggggttggggtggtgtttgtggtggtgacgatggtggtggcagttgtgacagtggtggttgtggtggttatagtggtgatggtggttttggtggtcacagtggagagagtggtggtagtgagggtggtggtgatgatggtgatggtggcgatggtgataatggtgatggtgatggtggtgatggtagtgatggtggtgctggtgatggcagtggtagtgatggtgatggtggtggtggcagcggtgatgccggtggttgtggtggcagtagtggcaaaagtagcagtgtattaattcactttgcattgctataaaggaatacctgaggctggctaatttacagggagaagaggttttatttgggcccatagttccacatcctgtacaagcacggagctggcctctgcttctggtgagggcctgaggaagcttccattcatggcagaagagggcaaagcgggagcaggcagtcacacagtgaggggagaggggaggaggcaccaggctctttcgaacaaccagcactaatgagaactaacagagtgaaaactcattcattcccatgagacgagcacccagccattcatcagggatccacccccatgacccaaaaccccccaccagacccccctccaacactggggatgatacttcaacatgagaggtggagaggacacacacctaaaccacagcaagtagtaacttgtgtgagaacaaatctgagtgcttacatgccaagcactgtctcaagtgcttcacacatattatctcatttaattctcagttaaatcaatgagatgtaggtaccattcttagtgttattttacagaacagtagggccagacagtgccctccccagaggtctgggtgccccgagctgagactccagcaccggagccgggacactcctctgaggtctcagttgccgctcctgggtacttcctctcaacttctgggccacactcgtccaacctcttcacaggctgtgccagcccagggcaggagctgcctccctcctcgcacttcctgttgctttacattatctttgcctctcaaacactctgcacctgtcagccattgttcatagcgattctttctgttctggtgtggcctgtctcctgcctggccccggagtgacacaaggagggacctggccaccgacagctgtgatccagctcggcttgggctgctatgccactagttcccttatcctagagacaggccgcccgtgtttttgttattgaaaatgcaggtgaggcttgcagtgaagcctttcacacacaggttgtgtgatcagtgagctccaatgcctccttcccctcccaccccaggcctcccctttcttggccaaaggcctggcacagaaaaggtaacccctcggcattcctgctgctccaggcatctgcccaggcccctctgcctggctttcattgttggggtacttttgggtgctgcgttgcctactcggggaacagcttttccttagtcctcccagagtcccacttccgctctcgccctccctctaacccagtttccacgacacctgtggccgatgctttgttacggggggttgaaatgatttccttgtttcacagggaatggttttattttcactgtttcttcacactttgttgttcgggggagatttcaagagaaagagtagaataaaaatgctactcttctgccatctttatgcagaaaccatgccaaattaacaactgccagcaggttctgtactgggccccggctccccaggggatgggaccacctccctgtgatctccttggggctgaagcgaagcctaagatgaatgcaagaaccactcctcagggacaagggagcaagacgaacacatcagacttgcatttttaataactatttagcatataacaatttgccacttatggcctcactcaataaaaaatacacttgttattccatgttgtgtgactagcactgaaaggaaaaaggaaaaaaaaaacccacagaaaagggaaggattcaagacaagaaaatataaaatgagtgtgcaccaacaagctacaggtgacttcctgctccatgcccactccctgctctgggcacacccggccctcctgagcaagaacacaaggtgggctgccccacggctccagccccgtgaccatgcacataaatcactagaggacaagcctgggtccctccccagggcaaggctccttccagggcagacacggaccgggagaatgggttagacaatgcggacgcaaagcttcgtgctttacttcctacagacacagatttctatcaaaatcagtggaagaaatatgggaatacaagataccctgaaattctccagagcggtacaagcccaaattaaccctttcttacacactccaaactcattctctcatgacataattctttgcctgcaaattctcccaagctcagccctggaccttccctcaagctggaactaaccagagggtctgtggctctacctctaagaaacttggtttgtcgcattataatgtcattagcatggggagggagccctctgccaggaagtaacatgtgattagtacatcatctactggaaacttaaccagaaccagtcaaactccccttgtatgcctggttcatctcacccatacgtcaaaagcacataaaacaccccaaagtcctgctaacttgctttccctttttcattctctgtctggtctcactagcctacaatttctctaactgtattaaattacccggttttatttacacatattactcttgatacttttccctcctcctatacaatacattcccctttgatcaatgcactcgccagcctctgacacaccaggtgtcctgccaaacacgacctccctagttcactcttgtaatgtatgtgctaaatactaccccccctatttatccaagaggaaatcgaggcacaggagtaacagttccccaaggacaaatagctagtaaatggtgaagtccaaacttcagcacaggtcccctgaccccaaactacacgagctggatgcatgatgggttggatcccaaacagactctttccaggcctgctaatgcttctctcccattcattgaagaaatagttctgctgagtagctgatggatgctgaggtctgggaaagggcactgggggtacagaggtgtgtgctcggtcccactgtcttctgctgtgtgtctttcatgaagaactggtttcccactgtcatgatggcaccaagcctccccaaggctcctgcactcaagctctcagcctgtaagccctcgcctgacttctactgacttcaactgaatccacaaagaagtttttagattctctgaaaactgagaatttaaagtatctcttctacaagtaaacaatacaaacattcccagggtcaaagctgcttacaatacctacctttagtggtgagaactttcgaggtgacctccagtttctccaatggttccattccaatattttccaatttaatgattagttgctgactttctccattgtaaagctggacagatacattagtagatatttcatcaccagaagaaggttgcaatgaatgtgcagatctaaaataagaagaagaaatttaaagaagaaagaaggaagaagccaaggccatttgaaaattactcacttcccaaagaagaatcaccatactcatgcatttcagaaacaggggctaggaaatctgggcttcatatatggagttcagtatccagctctcaggaatggaaagtgagctgccacatgcctcatgctttcctcatgcagacacgtccaggtctttgtgtgtcataaacatgaacaccctcactcagccttcatttctcaggcatatgtgaagcataaaaatacttaattactaagttatggggtataaaaattacatgatgaattcattcaaataaaccatgaggccgctgttctctcaaaatctaaaaaatgtcatgcttagaagtaccttgggaaactccatagatttaagaggaaaatgtataccaaccattccagctgctaacatagagctgaggccaaagaggaaacagaagctgtcccacagaccccttcttacaggtacaaactgtaaggaatgcccaccaacacctggcgtcacatgagggcagctgggccaggccctggggtcaggcagtatctgtggggctccatcctcacaccagtcaggtgaggccctggactacgggacaggccaaggcagccaagccagatgaacgtgcaacacagaagccagggcctccccgaggctcctgcactcaagctctcagcctgtgagccctcacctgacttctattgactttaactgaatccacaaaactaattgtcctggttgcatccttcccaatccacaggctgcaaacagtgggttgggaaggaggtcactggtgatcacagagaaaatatatctggtagcacagtggggacaaatgccagcagatgacaaatagaggcatgtgacaggtgaggttaaacacacacacggctccctggagaagtttggccacaggacaaaggggcagacagaggaggtggccagagcggggaggccaacatgttctcctggggcctgaaggtttcctgagtaccccactaccttcttcctgtccctgaaggatttccacagagagccacaattagtccagcatacttgagccaacatcgtgtgcttagtgcatccagaaatggctcatgaagtcaactaagcggactgtggaccaccccactccagacactctccagcagtctttccaatgcccagctcctcctggccctgctcccggtcacagcacacaggatcggagtcggatctgcttcccacgccgaagcacttggtgtcacacactattggtccaaaggacagaaaagaatgttccagactcagacctctgccacccaagggaagaaatgctgcttaacacaagccaagctcatggtgccgggcacgtgtttcctgggggcttccagatacagactctgatagaggagcttctgcatccaaaccaaattttggtgaaacaattgcataataaatcaaggtgagctccttggaatttaaatatctttaacgatcatgagtcaagaaataaacttcctctgtcaaggaaggaaaattggactcgtgtccttaccatcaagggctttttcccacctttcagcaggcagcctttctcaagcaaaagtttatagtcaatgtggatttgcagagaaggtatcggaaaaacataaaacactgccaagattcactattttgtgtctcaaacaacaggattttgaaacaaaacaaaacaacgcttcacctggcagtcacagggcctgggcctaacacaggccctgacggtcccagctgcagcatcccagttgtcatgagcagtggagcttgggtgggaatcgggctggcactgaaaaggagctgagtcctgaacaggccatggcactaaagagatggcagcagggaccccactccagccaaggtcaggcccccagggaggggctgcagaggctgggcaagggtcaggtccagtctcctaggaggagatgaggaccgggagcttcttggcagagagaaactccaatgtgggactatgggcaaactgtgggaggtaggagtaaggtctatggcgatgagactctcttgtttaaggagatggcccctcatatgaggtctgtgttgagggagcccctgggtctcagcagcacaggaagtgcaacgggagtcactggtgcctgaagcttggcacgcctgtgtcccccgagcactctgtgggctcagctgcccttcctgtagctctgccctccccacccctgcactggaccaaaagttttttcaagacagggacaaatttttttttttttgagatagtctcgctctgtcgctcaggctggagagcagtggcacaatctccactcactgcaacctctgcctcccgggttcaagcgattctcctgcctcagcctcccgagtagctgggattacaggctcatgccaccatgcccagctaatttttttgtatttttagtagagatgggatttggccatgttggccaggccggtctcgaactcctgacctcaggtgatccacctgccttggcctcccaaagtgctaggattacaggagtgagccaccgcacccggccgtgacaatatttttatcttgcattatcagctcctacccagccaggcaactggcacatagcaggtactcactaagtatgtattgaacaaattaataagcatctcaaacttgaaccactgtgcgacacagaaaagcacgctagcagtagtcaagatgggcctgggacagagtggcctgctgcacacttcacagctgcctcctgctgagcctcaccctgtgcagtgcatctctgtatggctgcctggccatggagagggccggacaacgcaattccacaggagatgccatcaggccgcctgctcctgacctctgccctcatcactgtcagtgctcaaggcaccactcccgccaggctccatctgggcacccgcgactcccatcctggaatgctctctgccacatcccactggctgcctaccagctctgctcctctgcgcgtctcctcggcagaggcctttcctgagaagttccctgcaaagcaagcctggccatctgacactgcttcgcaaagtgacctgccttctgtctctgaaggcctgcctcttctggacatctcatctcatctgacccactgtgttttcatcacagcgctgaattctcctgcgccatggtctgtatttattgggttggttgacttgttgttccctcttctttgcattttcttccatgcttgattatctgaccaattgttgtggatcttgtaaggcccagtttaataccacatcttctgtgaagccttcccgaaccccaaagacagggtcaacctctactttgtttttatattacagggccagttagcaaatttgactctagttagtctgagtacctccttccagactgagagctcatacaagggcagcggcctaggtcgagggcattttttattcattgcattttttattaattgctagtcctacagcacagagcctaaagcacatggtaggtgtcgataaacgtttgtgagtaaatttaatgaatcagtcactggaatgttcatattagattaataacaatcaaaactcaaagaatagtcacattttatttcaggaagtcaccttagaaaaatatatacattatatacaattttttaaaataagaaataaaaagcaaacattttaactccaaatcggttccactggaccctcctcctccagcccctggtcctcatcaggaccatgctgggatccacattcctccccagggcccaggctcggtgccgtggtggccgcccacagcagcacatcttgttgagaggtagcaggtaccagagcatgcacgcacccccgtcacagtgcatccgcaggacaataaaaatggggggtcagaggcattatctttggaaatgattctaaacacaggagaaaaatgtggggtggacaaagagaagcagctagaggacctgctttcttcactgccttttacagctggcagggaccttcggggacaccttattagcaggacaaatgacaaagttaaagtacctcttctcaagttatttttcctttttggtgatctgcccttagcgtttcttcgccttaagccaccccccgcccttttgctggagcgctggccggagcttgctaagctggagatggagccacgatctcctttatgagctctctcagtgcccacctccagctttcgttgggcggctggtgccctgcacaggcctgtgagcgcgtgccgtgacactgtagctgaagctagtgtccttcctagcctagcgcccactgggtgccacagttctacggacagcagtggcagaatttcagcagccaaagccagagctgggagtctgagcgtctggctgttcaagctaatgtgcttggaagcgtccaggcccgggaagtcctggtggcaggctcggcggaaatcatgtgtccatccaacactgaagccttgccaaaattcatctttctaaacagcatgtgcaggtataaaatccacctagcttaagtatgcaatgcaatcatttttggtaaatttacaaatcactgatacctattgtttttttgttttgttttgttttgtttttattttgagacaaagtctcgctctttgtcccccaggctggagtgtaatgtcgcgatctcggctcactgcaacctccgcctcccaggttcaagcgattctcctgcctcagcctcccaagtagctgggattacaggctcctgccaccatgcccagctaatttttgtattttttttttagtagagacagggtttcaccatgttggtcaggctggtctccaactcctgacctaaggtgatccgcccgcctctgcctcccaaaatgctaggattacaggcatgagccaccacgcccagcctgatacccagttttaaaacacttgcagcaccccaaagagatgacgcaggagcacttccaatcagtttagtccccacaccactggcagtctcaggcagccgctgagctgtgtcctgccactagagacctgctttctggatgtttcacatcagaggactcacgctctgcgcctcttacatctggcttcttgcactcagcagctcgcctctgaggctggtctgcactggggcacgtgtcccttcgtcccttcattgcggagtggtgttccactgcagggacacaccacattctgctgacccattcaccagctgatggccatctgggccctttccagttttctgactgtgaacgatgctgctatgaacactcgcacacaggtttctgtgtcaacatatgtgttccattgtcttgagcaggtacctaggagtggagttgttgggtcacatggtaaacttatgtgtaacttctgaagaaactgccaatgtattttcaaaagggatgtcccatcagcatccccatcggcctcgcacgaggcgtccagcttctccgaaaccttgcagccctgctatggtgagccctgtgagcgggtgtgaactggagcctcacatggtgccagttcagagactaatgatgtcgaccatccttccaggttgcttatgagctatttgtatatcttgtggtgaaataggtactcaaatctcttgtccattttttaaattaggttgtttgccttatttttattaagttttaagagttcttaatgtgaatataagctctttatcagatatttaatatgcaaatattttcttccagtctgtaactttcattcttttaatggtgtctttggaagcgtaaaagcttttaattttgatgaagtccaatctgtcaacgttttattccagggatcctgcttttggtgtcacatcaaagaactctgcccaattcaaggtcatgataattttcttttattttcttctaaaagttatatattttcagcttttaaactcaggtctacgatcccttttgagtaaatgttgtctgtgtttcattttattccccggttatacgtcagtgtctccacctctccttcctctgttgaagaccgccctgcctgctcttgcacccagccaattcctcctccctcccatcgagcctgttgtcgcctcctggaagaactcttccctgagtctgtgacctcccccagcacatgggacctcccgcatcacagtcctgacgacagtgcactgtgattattcggcgacttgtcaatttctccacttgacagaacttcccgtgaggacagagaccaggactgtcatgatcagtgctacagccccatcacccagcacagcaactggcaaatgaaagggtctattgaacacatgaatgggctttaaaaacatttcagaaaatcccaagacacattttataaaaatggccaaaaggatatccattaagtgttattcgtaagtgcaaaaattaagaacaggctggatgtggtagcttgtgcctataatcccagcactttgggaggccaaggtgggcagatcacttgaggtcaggagtttgagaccagcctggccaatgtggcaaaatcccatctctactaaaaacacaaaaattagctgggcgtggtggcgggtacctataatcccagctactcaggaggctgaggcaggataattgcttgaacccgggaggtgaaggttgcagtgagccgagattgcgccactgcactccagcctgggcgacagagccagactccacctcaaaaaaaaaaaaaaagattgtgccacggcactccagcctgggcaacagagcaagactccgtcaaaaaaaaaaaaaaattgagaccatcccaaattccaatagcaaggaaattaatgggtatgcaattttgagatatctttatgatgcgctttgttgaagcaattaaaattgaattttctcaagaatttgtaaaggcatgaagaaaagcttacgttacgtggttatgcaaaaagtaatctataatactatatatgatgtcatgtaatctcaactattcaaatacatatttttaaataggatggataaaacactggaaggaaatatcacaacaaatcatttacagtaattgcttctgggactcctgagatttctttttctttcttttttatgttttcctgtaacgctaaaaaacaaataaacaagatcaaaactatttcttacaggataagagttggctgagcacggtggctcacacctgtaatcccagcactttgggaggccaagatgggtggattgtttgaacccaggagttcaagaccagcctgggcaacatggtgaaaccccatctctacaaaaaatacaaaaattggccaggcgtagtggtacaaacctgtagtcccagctacttaggaggctgaggtgggaggatcgcttgaacctgggaggtggaggttgcagtgagtcgagatcacaatactgcactccagcctgggtgacagagtgggaccttgtctcaaaaaattaattaattaattaaaatataatataatataaaagtttaattaaaattccttttttttttttttttttgagacggagtctcgctctgtcgcccaggctggagtgcagtggcgcgatctcggctcactgcaagctccgcctcctgggttcacgccattctcctgcctcagtctcctgagtagctgtgactacaggcgcccgccaccacgcctggctaatttttttttttatttttagtagagacggggtttcaccgtgttagccaggatggtctcaatatcctgaccttgtgatccacccgcctcggtcttcaaagtgctgggattacacatgtgagccaccgcgccaggccaaaattccctatgtttttaagggaattcctaaattccctaattttgttttcaaaagaattatgattccataggctaatttcacattctgttctgatcatggtaagaaagatttcaactttgttctaattcattttaagcaaagcgtattgatgttgcttatcttacagaaatccttcacctatattctggtcataagaattacaggctctttgtgccattaaaaaaaaaaaaaatgtaggaccaaaaatgatgcctcagagccactctgctctgtgaccctcgtgcacactacctgggcagagaggtgctgatctgcagtcttggcaacgcgggaatgacttccactgtggagccactggtttttattcccggcaggttatccagcaaacagtcactgaacacaccgaagaccgtggtatggtaacctggaatagaaaaggaacttcttcactccactggcaaggctttgggtctcacgcccacggctgaagcagtgcgaagagtacggggctcctcttcagaagacctgagttccgaagctgcccggggcccgccggcgctcacccacactcccgccctcaaccccacgaccctcactgtcctcgtacgtgatggggaggataacagcatctgcattcctgtttcacaaggctggctgggcccaaatgaaagactatatatgtgaaggtccttgtaaactataaatatctacttaataatcagtatctcatccctttactcatttgcttttcagatttatccatctctaaaacgagaatgttaatattctttcccaggacataatgtgacttaatgagtatgtgaaaaatgcttcaaagctttctgttgagagatgaaagttcacacacgagccaattgttattgtagctgctgctgatatggcagatgtgctgtgtgtgtataagcaccataatttaagattagcaaatttcccatgttaaaaaaaaagtccactggttagataatcacttgaaattgtttaagcaaagctttaaaatggcttttgaaatttcacgagataattattataaacaacattcactctgtaacaaaattaaacaataccccatggctagatgcctagggtgacaacttttctgcattcatatgaaactattccatactaaaaggagaggcaggcactccctcgtgggcaaatcagggaccttacacagcctcagtcagccccgtgctcacctcctgccagcttaaagctgccctatcaacacaactcccattcagagcagccacgcttcctctaaagtatacctcttcaaagacgtcttaaactggcaaacattctccttcccaaaaccacatcttgcactaatgtcctttctataaaacctggtatgacatggttttgtctgctaagcagccattattttgcaattcttaatttaagtcagtcattttccttttcttacctgttgcttaaaataactgccatataaacccaaaagtctgaggacaaatagcacattacaatgtctgataatacaaggtcagtccttttgaccttgttcccaaagcgggctaaaaatgaacactcactagtctggacccaggataaacaaccaagaactgcgtgactaaggctctgactcctcaactgtgaacacactagttacggttatgtgctattctgaatcaagcccttcactcctcgttactcctctctcatccattcctatctcctatgctccactgccaggccacggctatgggcctacctctgtccctttctccctgggtcatcgctgaagcttgatcactgctgtccctgcctccagtccttcccatctcaacagggatcctggatcctgagggatggctctgaactgcccacctgaccacatctctcttcaaataacgcagcagccccaatgccctccagagaaagccagcatcctttggcaccgtgtgtaagaacccaggtcggccctctgcctcccttccagcctgtctcatctctgccaccctggcctggaccacccactctgaccacccccaggtcccccaaatgtaccatgttctctcttaccaccacgttgttctttctgcctggaaccctctttctgccccctgtggactccccccacagcccacccccattcatttgaatagttcctagttagccttcaagcctcagggtcactgacccactcactctccccgctgggtccatgcccagagtcattcgctcccacggccactccactccgtattcccacttggggcagcacaccctcacctacgattacacctgcctcactcacccgtagggagcacccttccagcaaatgtttgctcttccaggcaacaaacacacactgaagacctactgtgtgccaggctccacaataggcacggagctgcagctgagcgagacacacgaggccagcaaggaatctattgcacagagtcaggaaggaggccaccgcacaggggcctaggccagcgagcccatgccgaggaaggctcccggaggaaggaaagcctgtgctgaggactgagggaagcccaggagccggccagggtgataagcactcgatgggacacaggcaaagcctcggaaagcctggaaagctgccagaactaaagagtcttcggagactgaagtaggaggggagaggcagagaggaggttgcggaggccagcaggagccggaccacactgggctccagagcaacacttaaggactgggccttgataacaagggcctggcgacagctgtgaggctcccagttgagagatgtcaggggcatattcacactaggaagatcgccgggccacagatgggaggtgggtctgttagcaagcaagaccagggcaaaaacaccagtcccagtgcttttgtgacaaaccctagaagagttatgatctgcaagaccggaaggggcagtggaggtggagagaagcagcagttctcaggaagcactgagggagggaggtgggggtgctgtgacagacagcgagggtcaggatgacccccaagaacccgttagggcaaatggctgatgggaatgcccgcactgagatggaggcttgacgggggcaggggcagttttggggaggcgaggtagggagttctgatttgcatgtattatatgcgaggcgcccaggggccagctgggaagggctggaggtgcaggctgggaagaagtccagccctggaaatcatctgcacattggaggaactggaagacagcaaggccagggcatcggtgggatcacctaaggtagcctgtggaagaggaagagttaacagggccagggaacacagggcgagagatggggaaggaaagaagtggggtgtgaggaaggcctgactgaggagtgggctgcagaagacaaaagagacccaaacagaagggccagagaggcagtaaaacatccagagaggcagggtcacagcagctagagcagagaggcggtaaagtatccagagggtaggctcgcagcagccagaggagagggcatgcctagtggagggtcagccagggactcaaagggcactgaggagcgaatttagaaacaaaactgaaaagtaggccctgtatttagcccaaaaaatactgcttgtgacaggagttttggggaagtgaaaagggctgagtccaggatgtagagggttaaaggccctctgcaaaggggagattcagcgtgtgtagacaccctctgaggagttccagcaagaaggagcaggaggaaggaaggctcactggaggaagacagcagaaaggagacgaagcagagggaggaggggcatgggcagtggggtcagagcacaggaaggacccctcccaccaccacacatcccgcaccccacgaacaggtttttttcatgcttcccaaagagacaaggtcttcattatcttctaactggttaggactggcatgacgggcgatcggctctggacctcatggaggccatgcaagggttcagcagaccctcctgagcaggaagcatgaagggactctccttaccgttcacagtaatcgttccagtcgtctgcgggaccccgacgagcgtcactgggtacagaccagattcagccggaagagaaagcgccgcagggagagactcgaactccactccgctggtgagcagcccctaaaccaagcgacgcagcatcgtaagcccggagcaaacctactgtgtgtgctcagttccaaatgagccttaagacattggctatggcacatcggaactgctggaataaaatcaccaacagtcttcacagagaacttcggagacagtgtacagtgtaacacaaaaccacctaaacatggtaagcactgcaggtgctcaggcgataaaccacggatccacttgatttcagccctgtttgctgtctgatatttatcattttaccaaatgggaatgtgaacacaaagagaaaatattttatttataaacaaaaataaataaaaacatggctgggcatggtggctcacacctgtaatcccaacactttgggaggccaaggtggaaagaacacttgagccccaggagaccaagaccaacctgggcaacacagtaagaccccatctctacaaaaaaaatttttaattagccagggaaggtggcacgcacctgtggtcccaactacttgggagactgaggtgggatgatcacccgagcccaggaggctgaggctgcaatgatcacaccactgcactccagcgtgggggacagagtgagaccctatctcaatcaatcaatcaataaagtgtggaactataccaccagttaatatccctgccacacatctgtgagttatcaacttatttcggtatgtactaagcttactagtacaggcactaagcttgctagtgaacaaaacaggcagattccctggcctcaagacggtggcccatgattggaagcagtacaggtatgtcagccctcaggacttctcagcattgtaacagaggtcctactcagggcactaaagcaagaaaaaggaagaaaagtcatacaggcaattactcacagaaaacaaaaccagggtcagaaaacgctatggaatctacaatgaaacttgaactttcgagtacatttagcaaagtgacagagtcagaaaaaaaaggcgttatttctatagtttagcaataagcaattgggtaaaatatcattaacaagcgatcaaaaccgtcaactacattagaataaacctaacaaatgacaggcaaggtttcataacagttacagaacactgctgagataaagaagccctgggcgaagggggaaatcctggattctttttagcgggttggttttctgcagcagtatggtcaaagctaccccgcaactatctcagatatgacaggactgagcatctaagtagatgtgctgatgttgggagcccgagttctcacgcgggaagaaaggacacacacagatggaggaaggcaagcaccctctggagaagtgctggaaagcgagggtccccgtgaacagggcagatgctacatgcatgtctatggtgcagacgcaggggtatacacatgtgtacatatatgtaggcatatgggtttagatatatatatagtgtgtgtgtgtgtgtgtgtgtgtgtgtgtgtgtgtgtgtgttctcatgtatgtgtatatgcacacagacttttcccaactctgtctacaggaagcacccagaagcaaagccactctctcggcagtgagtacacttagtgcccggacttggagccaaggtgtgaaatgatctatgtgtggaacagatgcagcaggcaagggtggaagccgaggagccaattgtctctaggcaaatatattggcatttatttcttttgaaaatagctaaagcaatatggccaactgtgaacattttttaaatgtgaatggtggagatgcgagtgtgtactattccctgtaacatttcataggtttaaaatacttcctaatttagtttttaaaactttgcccatgatttgtgggctatctccatgtggtgctttttattttgttccctgctcttcctcatttgttataataagcacatattgtttttaaaccagataaaaatgaaagctacattttaagaccaaaaaaaaaaatgtgtaagaaagagcagcaggcatttgatactttaaccactttggggaaaattctctaaactgcttctccctactaaggctgagacagaaagccacaggaaaggccagagccaaatcctactgcaggtcagtcctcgcccaacaggaggagaggcgctcctcccgagcgcacctcgagactacaagctgaacatccagctgagcttccaggagctcagacagatttcgggaaactatgccacgtgctagaggcctaaacagcatttcaacagccaccacgtgtccacctggcaaactgcaactcagcctgtactcacagccaggctgtcacatctgtcccaggaacccttccctgactctccagggccaggcagactcccgtccacaacaggcctgcaacacctcatgcaccccaacagagccttggtcacagtcgcagcagggaccagggcctgaccatctctgtcccctcagggccttgcctggggaccgacacgtggcaagagcactcagcgagatacatgcatgaaaggcccgcctcttaccctgaacaccagtcataaaactctaaaagacaacatccattctcgcagcaccctcctttgcgtgctgctgaaaagttacacagcagcaccacacagcaatgcagagaagacttgagggatgggacctacatcggcatgggagggcccgctctgaaaacacagaatcagcttagagcgccagtactaatctccttccccctgactagagaattgggtaagcatttccaacagaagagattacaaactgaatttttcacaccctacacaaagcacagaaatgggacgtcaggatttcaaaacaagagaaagctcgtggtggtggtggtgtggtcatttatcctcccattccacagcttgttcttccctggggccttggtcatcttatcatcttgcagcaataaaataatgctgataccgttgagtagcaggcagaatggggactttgcaacctcaacacatctcacgtaagcttcgaaattattatttcacatcttatacccaatcaactaagctcggcatgtgttcaaatcagaggtttctttgtaggttcaaatatttattgaaaaccaagcctaaagacacaggaataacaaaacatggtcttcatttacaataagcttatatgctttggcaaaacaaacataaaaacagacacatatcgtaagatgtgtgcctcagacattaagtaaaacctactttaatgagaagtttgtatgttagcccaaaaaggtcaaatgattggtgatacataccatgttttcaactcgaagttcaaacggcattgggttatataccatcagctgaacttcacacacatctccttgaacccactggaaatctagaaaatacacacacataaatgaatccatgtattagttggtattttttcactttctacatggtttccaattattcctctggcaatttacattctcagtgaggcagcaggctctatgatcttcttgagatgggtgattcaaagctgctttttccaccagctttctctgaaacaaagcaaggtagctgtcactggcactttgatgccacatgaatggcgcttgtcactgccttcggcgggctgcattcatgctggcatcagtccagatggcactgttcttggtacagagccataaggcacactgcgcttcacggggcccagaagctggcaacacaggaagacggcactggggtcacttgtgagtaacacggagtgtgatttgccctattcccctaagattgtgagaggggagtcttctcctccccacccactcccaggtcaactgcagttcagtacctgtgcaggggcagaattctgacgacctccaaaacccccagccttggtgtgcacaacctggtgtgcatgcactatgtaatccccaccttcagtgtgaatatgatgattaggctatattgtaaaacaaaggtggaaagtttttgcagatgtgattgaggaccccaatccgttgactctgagttaatcaaaaggaaggttgtcctgaatgggcttgttctaatcaggtgagaccgcacaggagaccatatccttgcctagagggcctgtggaggggaccacatggcaagggcctaagagcagcctctgggagctgaaagcagcaccggcagacagctggcaagagaacggggatcacaggaaatgaatgaagaacggcctgaggagtcgtgagagcaggcccttcccttagttgagcctccagatgaggacacagccccagatgccacttggatttcagtcctgtgaatccctgagcagaggacccagctgaagcccacacaaatcatgaggaagcagatttgtgttgtttgaagccactgagtctgtggtcatttgttacaaagcaacagaaagctaattcagcatctgtcccaatttccatcaccccctcctccctttacaatcctctcttaggcaaaccagaaggaatttcagaatcaatcaacaggtggcaggcatgtgttaggtgtgaggcacttccacacaggttatctcattactctgcataaggacctcctgagataggtatgataacccccgtcactgcaaggcaaacactcaaggtccaaacagggtaataaattggcccaggaaccacacagcaagcgagaggagctgctggattcaggcctctgaactcagaggcaccccgagcagacacgggtggctaacagggcagtggagggcttcttctctagcagataagaacgtctgttgaccagaattattcaactttcagagctttcataagcatgttctcaagatacagcttttcccacacactctgcaacctgcacagagatgaggactgactccaccacacctatgacatctgacccagagctggcatgttgacattgcataaattccctatttaataaatggtgctgggaaaactggctagccatatgtagaaagctgaaactggatcccttccttacaccttatacaaaaattaattcaagatggattaaagacttaaacgttagacctaaaaccataaaaaccctagaagaaaacctaggcaataccattcaggacataggcatgggcaaggacttcatgtctaaaacaccaaaagcaatggcaacaaaagacaaaattgacaaatgggatctaattaaactaaagagcttctgcacagcaaaagaaactaccatcagagtgaacaggcaacctacaaaatgggagaaaattttcgcaacctactcatctgacaaagggctaatatccagaatctacaatgaactcaaacaaatttacaagaaaaaaacaaacaaccccatcaaaaagtgggcaaaggaatcaacagacacttctgaaaagaagacatttatgcagccaaaaaacacatgaaaaaatgctcaccatcactggccatcagagaaatgcaaatcaaaaccacaatgagataccatctcacaccagttagaatggcgatcattaaaaagtcaggaaacaacaggtgctggagaggatgtggagaaataggaacacttttacacttttggtgggactgtaaactagttcaaccattgtggaagtcagtgtggcgattcctcagggatctagaaccagaaataccatttgacccagccatcccattactgggtatatacccaaaggactataaatcatgctgctataaagacacatgcacacgtatgtttattgcagcactattcacaatagcaaagacttggaaccaacccaaatgtccaacaatgatagactggattaaggccatgtggcacatatacaccatggaatactatgcagccataaaaaaggatgagttcatgtcctttgtagggacatggatgaaattggaaatcatcattctcagtaaactatcgcaaaaacaaaaaaccaaacactgcatattctcactcataggtgggaattgaacaatgagaacacatggacacaggaaggggaacatcacactctggggactattgtggggtggggagacgggggagggatagcattaggagatatacctaatgctaaatgacaagttaatgggtgcagcgcaccagcatggcacatgtatacatatgtaactaacctgcacattgtgcacatgtaccctaaaacttaaagtataataataataaaatttaaaattaattaattaattaattaatacagtgcccaccaggtgagctaacagctcccctaatgcctgcaccaccatgtactcatctgagcctctgcacaatgcagtgaatggccacagtctatgtcagcagcacaaatgttatgcccgttctacaaaaaaggagaacccacctgacaggctggcccgcctgcctgtcctatggtcctgagaagcaagaaaactgagattcgaactccagtctgtctccaaaacctacactcttttcaccctactgcttcacctctcaggaccccagaaactcaggtcttgtccttccctcatcccagcttccatgccccccacctcccaggcccaccagcttctgaggaccttcaatgggagggagctcacccgacctcctcatttacacaagtcagtggccagagcacaacatgctcccagcccgcctgaccccgcctcacccagcctgcccggggccactgatggtcagcatcccagaccactcctcaccacaaatgaagaaggtcactctctttaaacaagtggctaacgtctggtaattaagaaatggcttgccctatcatggtcatgatgatgatgatgatgataataagccatttgaaaaatcattttctagagtactaaaaaaataatgtacacttagatggtccatgtctactaaagggtaaatctaaaataaactgttgattacataaaaatttattcttctttttttttttctttttttgagatggagtatcactctgtacccaggttggagtgcagtggtgtgatctcggctcactgcaacttccacttcccgggttcaaacgagtctcctgcctcagcctcccaagtagctgggactacaggtgtgcgccaccatgcccggctaaatttgtttgtatttttagtagagacagggattcaccatgttggccaggctagtctcgaactcctgacctcaactaatcccccccaccttggcctcccagagtactagaattacaggcgtgagccaccacacccagcctgaaaagtgatttttgctgaaagaaggagataacccctttccatcctcagcatgtcaaagcacacggtggtggcccttcctcactattttgtcctagaagtagtgggaaggcacaagaattagcctctctgaaaccccctcatctcaggccctgccctccctgttgcgggacacactgtgcatgctgtcatctgtggacccacggcaccaggcagtggcgtttattgacaagttcgtctctttctgctaaactgtatggacccatgtggcgggaaagactcctgatttatcaatgcatccccagcacatagcacagggcatataactgctaccaaaaatgttactgaatggctgccagggactttagaaacattatctcccttgatcctcaaaaccaccctccgtgtcagcttctaatgtccccattctgcagatagcatgactgcagaccacagaggcacaatcagctgtccacggtcacacagtggggagctgcagggccagggtgcagcccaagtccacctgacagccacagcctctccaggccaccacgctgcctctggggcagcagtcgaccttggcactaagcctggcagcaccacaaagacctatcacaaatgacagaaggccttcaacccaacacactcaagctgaggccagtgttgcagtcatctttgcatggatgtagctcagatgatggccacaccagccaacacacaaagactcgtgaactatcccaagttaaagtggaaaatggtctcaaacactaccctcaagagtttcttcatctccaaaaccctatgccacctgctgtgatgatacctcccccaattatacaccgaggttcatttagagagactggaaatttaggttaaagttatgtgatctgtcaagcttctgcacaagcactcactgatcagtacactgccaaaaagatattagaagctatgggatataaattgcattttcctaccaaacaaataatgtgcattttggctgaaacttgcgttatatctcagaaaaaaatcttacatcatccactgaatttgtcctcagcccagatgagcaggtacttcttactatggtgagaagccatactataaagaaaaaaggccctgggcatcgagtcctgcaacctggcatggagcccggggaatgtcactgataagctatctgacctggggcaggtacttaaatttcgttcagtcttaattttcttatttgcaaatagggaatataataatgccggcagcatcagcatcaaatagttttgagaatcactggataatgtttgcttaagccctcttcaacaaatacagattgtaattttcacaaaaggaatctttgacaatgtctttttatttgttttttgaggtagggtcttgctctgtcacccaggctggagtgcagtggtacaatcttggctcactatagcctcgacctcccaggctcaggtgattctcccacctcagcctcccaactagctgggaccacaggtgcccgccaccaggcctggctatttttttgtattttgtgtagagatggggttttgccatgttggccaggctggtctcgaactcctgggctcaagcaatccaccagcctcagcctcccaaagtgctgggattacaggcgtgggccaccacactcggccaacaatttcttaagattgaaaaggaaaagcagagaggcagggcctacaatccatgccatcagtggcacagggccctgtgccctggcatctgggttcacgctctgctgttgctgtcttcgaattcctagtgatgtttgaacaaaggccctatgtttgcattttgcactgggccccacaaatcacatggcccatcctgagaagaggagtctcacacctccagtctcctaaatcacctctggaagtttttctcaacgaaagaactgaagctttcctcaaaagttccgtaggggagacagttcatcaccaaccccaatgagaacacaaaagagcagccagagactctagaaggtcccagggggaagagcctgagcactcgtaggacagcaagtccggggccaggggagacagaggagccctgagggtggcctgcccatccccacggagctcggaagacgccctccagagaggaaaggtggagttcccacaggaggccaggaaacgacgtccccaaaacacagtgaggacaggatttgtacagctctctcctgcttaccgcaacacacgctggagcacatctggggctgccatcaggccctgcctgttcatccaccacgtctacccagcgcctacacttcctgtcacctcatgttctccagatcagagaagcagtggcaggagagacaagattggggtgtctttcagaatcaatagactaaaaatggcattttaaaaacgcatacacacacacacatgcatgcacacactcatacacacacatgcatagacacacacacatacacgcatacacacaatatacacatgcatacacacatacagatgcatacacatatacacacgcatacacacacatacacacatacagatacacacaaattctagagtagattatatagttagtgctcacattttcagaaattttccaaaatacagtattgactgcagtttttcaagggcatgaccccatgtctctttattttcttctcattctaacagtgaacagctagaacagctggagccactccttgcaaagcccacacggctcctcagatggaggctgtgtctgagcctccagagggcttccccagggtctgcggggcccccaccccacaccccactcccagttagcccagtgtttattgttcattcgagttcaacgtgtaagtaaccaggtacccctgctgacagatgtacagttttagagagcgtttattcacatttagtctcgatagtcaacttctcacgtttgtgtcttgcctgcatgaactaaactgaaaaaccagccgagggtgaggactgtgaggtccaggtaataggtctgtcccacacctactgtgcacgtgagaggaaaccatagggtactaatgggaacaggacacgtggtctgtgatgtgaaatcaagcttgtcactaactgagtaacttttagttacttctaaaagtcgtttctctaagtttgtttcctcatctgtaaaagggagataaaaatgaaatctcccaaaaatactggaaaaactaaataaggtaacatatgatagcctcttataaagcacaactagaataaaagaaatgattaccatttttaaaagcacaaggttctttgagtactcctaccctagttatgccctttatctcagcaaacaactttatttcctctgaagcactttattttttaaggcattcggataatttacaaattgttaatgaagtttattatgagacccttacagaagctaagaaatcctagagctagtaatatatgagaaatgctcatcaagacaatgtgctggctggacgcagaggtccccacctgtaaccccagctctctaggaggccgaggcaggggattcacttgaccccaagaattcgagaccagcctgggcaacatggcaaaactccgtctctacaaaaaatacaaaaatcagtgggtgtggtagtatgcacctgtggtcccacccactcgggaggctgaggcaggaggatcaactgagcccaggaggttgaggcagcagtgagtcctaattataccactgcacttcagcctgggtgacagagctagaccctgtctcaaagaaaaaaaaaagatgatgtgctacacgtaatgctcttattgtcccttctgccttgaattccaccatgccctgccaggaacatgaaatgtacagtgagatctaggttctcctgtgagttcttggacatgacacttaaacgtcgtgaatcagtttccccgtcaacaaaatctataaaatgggattcataatatgtaccccatccattcattcattcttttgtcactgctccaggtgctggggagacagcagctgcacacagcctgacagaattctgggcttcaggtgatattgcaggacaaagcatcaatgggccagtgtgggtttgagctggagagaagctgggaagagaatcccagacagcaccgctagagatggtgggaggagtggcctgcaaggcgctgggatcagagaacacccctctgagggagggggcatttgaacagagaccaaaaggatgtgacaacaagagagccaatgatagaggggcaggggacgagttcctggcaaaggaaagagcgagccccaaagccctgggcttggaacaagcctgtttctttccacgaccagaaaggagtccctgtagctaaaccagagtgatggtggcaggaggtggcatgaaaaccccgacagagcgggaggggtgtgggcaggggggggtcagggagcgcctgcagtccgtaactcggggtgtgggtgagcttgcgagtgcaacaggaagcctctgtcctggaaagaaaagcatggtggaaaaaggagccggaatgccttcttcctaaattggaggtacaggaattaagagtagaaataaagaaacagaaggagaagaaagcactggatatcaaacacagagcgccgcggttgcgcaggcctcccgctcacactcctcggaggccccggcagtcgccaagcagcggccagcctccaggccctcaaggttctgtcacaggacgtgtgggctcagccggcagtggtccccagtgactggcagtcacaatctcctgcaaggggcctcgggcatgtctttgtggcagcaagggatggggagcttggcactacagccgggctttgggaaggacaccaagggacagggccggtggtgcatgctgagccctggtgcaggagggacgagagctcagacacaggaaagctcaggagagattgtccactcccagtctctcccacaacacagcttaacccaggactgactatcctgatcacctgtgttcacaaaagaacataacacgattacctcaccctccactcagtcctgaacaccatccaaccctgaatctttctctgatgactcagaagtcacttcagcccttgtaaaatcagtctacatctccaactgtcactcttctgtagttcacataagtctcagttaacaaaagtctttctggtttccagaactttcacaaaattaccttatatgaaataaattttttaaaatcacatctatgggcaattgcctgccaaaagcagcaaatcaaataaacttccatgacagactgcacacacgcacacacacgcacacatctgtgcacacatccacacatggacacatgtaaacacacatatgcatgcacgcacgcatgcatacacacatacacgcacatatgcacgcatgcacacatacatatgcatgcatgcacacatgcacacacatatacacacatatgcatgcgtgcacacatccacgcacgcacacacatgcacatgcatgaactggctcaaaatgctgttctaaaaatctagaaaagccattggaaatcaggtggcagagcacggtgggaaagccaggatcgacgtcctacctattttcttgttccgctcttctccacggttgtgtgcgataattggtgaatagatgaaaggacttttggttgacacgttctgacccagcaagcttttcattttgtgtggccggaggctagcaggaaggttcaatagtttcacatgcctgttgtttcaaacagaacacaaatacttcaactgtctggttagcgtggtttcaggataaacataaccaaacatgatgtatcagaaaaacagtaaatcagtcagaaggaagataaatggagggaggaaaagcactccgaggcatcaggacacagcaaggaagtgttgcaacagtaactcaagattctcccagacaggggaaatcactccctggaactgggggagcagccacttccctctggggactcctgaactgggcccaaggatggtctggagtcagaaaggccagcttgaaatctcgcttcacacttaccagctgtgtgcctttgggcacgtgccttgccatctctaagacgtaggttccttgtgtataaagtgcaggtggggccaccaccttccccatggacccatggggaggatccagctaaagactcctggcacagggcccactgcctggcccaggatggctcttctctctctgcctctccctttcccaagggacctgcccacagcaagtggcagccagactctgacccatgggaagagatggcacccatgagaaggtcaacagcaccctctgctctactcgcatgcagcagcatctgtatctgtcatcgcttcccacagtatcccagctgtggatgtctgccaatctgtactcatgctcgaattcatccagctagcattaagataaatttaccaatccatggagtctgagcatgagcaggcactgtgctaaccactgcatatgtattctctcacttaaacatcacaaacaccttcttagtttgggtactattactattgtctccatgtcatcaataaggaaactcacgcaagagggactaagtatactgtcgcaaatccgatggctggaaagcagtaacaacaggtgacactatgctcttaaaccacagtactagaaggtgctgtcacccttgtgaccagtttgggaagacggtggttaagatctggaacactcctggacgtcagacagaaaggacaaggagcagaggtgggaaaacaggaagactgatagtgacactgatcgtgataaatctacgtgctccccaccccccgcctcccggcctccgcaggaaggtgaggccacctgaggagctctggccagtaggttgtgagtgggagccaccgaggcctctgtgagacacacactttagagtgacgggccagcccccagctctctccttcggctgcacggccatggtgatcctggaggctggacattgagaaggtggagcaccagacagatgcggcctggagcactcagcaacctcccagagctcagctgccctggagagccacccaacccacaccaaacttgtgtgagggaggtagaaactgttgttacagtaaatcacgaagatttcagggttaatttttctgccacagtgcaccctaacctatactgcataataacaactgccttacagaatccacaaaatcaccacctctctcagtgaggagggacctcagatgcctcattccagcctgctctgtgcaaagcatgcctacagcactcggcagacaatccccaccacagacccacatcccagccccggggagcctgccacatgcgtggttctcacccaccaccctcagtgactcacggcaggagatggtgctaaccccgcgccctccagaccaagggcacacccagcaggtgctccccagctcccttcgctctgtgtgtgcccttcattatgcctttatcatagcggatcagaaccatttcattctgtatctgtttccactcagctgtgagcctgctgaggacaggggcaccaggaccttatctgtctgtagctgcagaactaataaaaattgtacttagcctatgaagctgccaacagcaaagcagaagtccagggataaagtgtccaagacaaggatgattttgacagattccatctggaaactgctgacaccgtaaaaacctgacttccctcaggaacagcagccgtcagggccgcgcagagcaccgcagagcgctgatcaggaaagcgacgccagacgaaccggtcgagaggaatgacagtcaacaaccactcaccttttgtttcttggtatttaattcatcaatcttattcacagggaaacatatccaagaagagatgggtggggactacgactggcctcaagtgcctcgtgtgtatgacggcgtggaggctgcttgctccgagtccggagcaactgagagagctggagagggcaaccgcgccagctgtagtagcaaggtggggccagccgctcccatcctgaatgctgctatacatttcttatcagctccaaacagctctggtttaagaaattcttaaggaaggttatggcttggccgctagaccatgtatgggagaaaatcctggacagtggcatgaacacagtcatggaggctgcatcctgattggtgtctgggagtccgaagcacgaccctgaatttgggcctctaaacacctctctgaataaatgcctagaatccttcctcaaacggtagaattaacttaaaagtttaagttttaaacgtatcaaagcaactcgaagctcactctcactagaggatttgggtctttgttcacgtaaacgccttcattaactcttaagctcttctccaggttgaaggagctcaatgttagctcttaaaaaaaaatattcaatgagtcccactccccatcactgcccccaaattaaagactcactggttaactggaaatggcactgaaactttattccacttccttaataataatccaggacttacagtgtgttaataatctacacgcttactaggggcctgatagactactgttggctactgtgtacacactgtatcatttttgcagagaattccatagataaggaaaaaagatcacttatagttctatcagaaccatcctctgctttaactctggtcaacagcaacaggatgtgggcttggctgcctcctggcagatgagatcacgcttggccactaccatctcttcgcaattagccttgggccaaaagcgcgtcttaggcactcaacaaatattttattaattgaattttggaacacaattaaaatagggatgtattttggctcctttttcattacttgcatcggaattacttgaaaccatctttgggtgagcctagttcatgctcccatgctacagagaacaagtaagtattttcctgtatattgctaaaatagttttattgtcaaatactaagaaaggcctcaagggaaaagaaaatggctctgaccatctattctaaaaccaaagtcataattatgagccaaacccagcagtaaattcgtttatgtttaacgattctatatagcaggtctgataatttactcaccaatgtagacatttttcaaccagcttaccctgtaacactaacaggagctttagtcttcaagtgtacatattactgagctcttcttatgtcataggggctgacctgcaatgcctgacttaattttttttttttttttttgagacagagtctcgctcttgtcgcccaggctggaatgcagtggcatgatcttggctcattgcaacctccaccttctgggttccagtgattctcttgcctcagcctcccaagtagctgggactacaagcacctgccaccacgcccggctaatttttgtatttttcgtagagacggagtttcgccatgttggccaggccggtctcgaactcctgacctccagtgatctgcccacctctgcctcccaaagtgccagtattacaggtatgaaccaccgtgcccagccccaattttttttttaattaaactggtaaaatccatgtttccgggcataggacgttgaagtgtttggttgatatatgaagacagtcccggatttgtttcctaaggaagcaccttggcctaatccatagctactgcccaggccttccttcaggtggagatgaggagcaaggatttaggaagagggggacaaccctacatgtgatgtggacatttaactactgcacacagattcactgcaggcctgccacggaccaggtgctgagagcattaacaacacgagcccgctcccctcagtcagcatcggcagacacctaccagctcttcttgatgcctgagaacataactctggattctctgttgcccaactcctgccaaaagctcaatggcattcatgaaagagtgtgtgatgcacagcagcccacccgttatcctagatgctggcagcaggggggctaacgcaagtcagtcaacagcaggccacaccgccctgtcctctgggagagccaccttcatcccctggtgctccggtcccatgccctcagtgtgcgttaccgaatgctaacagcaaaacaacatcagacacctgcctagatcttcatggggatgttgctgagcatgctactcaaaacatcagaatgttctcttcgagagaatccactagagaggtttcccagctcactgctgggaagagatgcatttccccagtgtgactgatacatgcctgttcttgagaggggggctcttgtagtcaatcacgcttccttcttgtcagttacctcacaatcacgctctctcccatctccagccattacgtaggacattatgaattccaggtactaacagaacttgttgttagttttctatcccactgttactttcccctcactctggttaccttaacttgttcttttttttgagagagagagagagggagtatcgcactgtcacccaggttggagtgcagtggtgcgatctccgctcactgcaacctccgcctcctgggttcaaacaattctggtgcctcggccacccaagtagctgggactccaggcatgcactaccacatccgactaattttttgtatttttggaagagatggggttccgctctgttggccaggctggtctcgaactcctgagctcaggcaatccccctgcctcggcctcccaaagtgttcacattacaggcgtgagccaccgtgccagacccaggaattttttaaaataactaaatagctacatatatgcatttcttaagggagtgatggaactaattcatttgatttaatttaacatgtacaaacaaaagtaaaaactgacagggaatggtaaggtgacatctaattagaggcaaaattccctgaaacctctataagaactcatgtctgcaaagagcttttctgcttataaaacaatttcccaaacatttcatttgatccatgcatgggaggtatgtctcatcaacctcagttcaagaagaggaagttaaatcatttgttcaaagtcacacagctaactgcagaatgcgggataggaatacaagactactgaacaaaagccagtggcttttccaattttacatgaagggggtttattggtgcttggcataaatatgtcaatgcattttagttactatccttcctttctgaaacctacagagatgcgtacacatcagtatccctcacacatcatcatgacagtcttagagaaggaagtggcatacagtcttttctagaagtatggcccatggcatatcttgggggaaaaaagatcttgctttgacaagaaaaagaaaagtgctggaggctaaagaattatggagaccaggcgtggtggctcatacctgtaatcctagcactttgggaggccaaggcgggtggatcatgaggtcaagggtttgagaccagcctggcgaacacagtgaaaccctgtctctactaaaaatacaaaaattagccaggcatggtggcacgcacctgtagtcccagctactcggaggctgaggcagtagaattgcttgaacctgggaggcggaggttgcagtgagcctagactgcgccactgcactccagcctcagcatcagagcaagactctgtctcaaaaaaaaaaaaaaaaaagaagaagaattatatggagcaaggacatcacatctgtcctaattctccctactttcaaatggcaaaaacttagaagaaaggcatgaaaagcgaatctggacagcacattaaagcgtgcacatttttatctatgggtgaaaattagtctcatataaaacatgagcctatttattagtaagaagagaagcatataaccagccctctgcatcagaaagtgccacaagtccaaggaagagaacatgcagttcataaagcgtgcacttgcttcaaggttgcacttttccaaggtatgctttctgacttgggaagggcagatattcatcaatgcattatcttgactcataggcattacaggtcacaaaccgaaaccaggacttttgatctgaagcagtgtggtgggatgagtgggccttgggtgtcatttgctattgtgtccttgtctgttgcctcccaacacccacttgcctcttctcctgtgcccagctattcgtaggttttgctttaggggaactacacacggtctccttgcagccatgtggtttgcagggactcggtccgatctgagtacataactccatgaggggcagtgaaaagcaaaaggacattgtccccctgaaagaaagcagtgttcctttacaggtgttactaaaaggcacctgctctcttttcctggacacagtagcaagaggatgtgaggcctggaggtgatgagccactctgatagcacctggggcctgcaactaaagccaacactgcagcggacagagctcagagggaaagaaaccaagttttgatgaggttgtttgagccctgactccagccctacctgaattcctccctgaactttccaggtatatgtgccataaattatttttgcctaagttagcctggtttctatcagctgctattacaaaatattctaagggatccaactatttactcattcaacacacaaggtcacctgggggctacaaagacaaagaagagagaaggacccaaaatgtcaacaaagatgtccagtcaagttccataagcgctacagaagaaagatatggcatacactgttggctggctgaccaagcacgaatttctgaccccattctccattccccacctatatcacagattctaggaaagctaaatatttattttctcagcctgtcttgcaattagagatggccatgagacacacttcctgttaatgagactggggcagaagcctactcgaatctgtcaagaacatttttgcttccctattaagcaaaagatagacatctctagacctgccctgtctcccttctttctgccttggatgtagatgtgttatctggagctgcagcagccatctggtaatcttgaggtaaagacagagttacagagaggccacctgtttccggcttcttaataaactagaaaaatatcttcctattgactatctactattaggtcttctgttctttacagctgaaataattcctaacttacaaagaaagtatagtcatttctacttgggtggctctggaaaaggctttatagaggacataatccttgaactaaaatcgtgaaagatgactaagtgtcatcaggcagagcagggaagcacaggcattccaagccagagataaagcctcaacgaaggaacaaaaccggccacacatttggcccactctaagtattcccacaagggaaagcaggagcgtaggaccaaggaaatagggcgctcacaatcaaagctggagacagggcaggccacagaggccctgcaagccatgcaaagcaagtacattagagtctgttctctaagcggtggggagcagagtaggctacgagatactccggctctccaaatgttccaaagaccttccctttcatttgaccggtcgtactgaggttccgtgggtttaccacactgaatctcaggcagttcttcttcccagttttcaatgagaccaggtacgatccacgtgaggaaggagtcaccaggacacttaggggttacttctctagctaaagtcttcagaaaatcatcacgaatatgtttatgcagatggtgggtcatacataaaattagatttttgaaaacagcccatggccaggcatagtggctcacgcctgtaatcccaacactttgggaggctgaggcgggcggatcacgaggtcaggagttcgagaccagcctggccaatatggtgaaaccctgtctctactaaaaatacaaatattagccggtcgtggtgccatgcgcctgtagtcccagctactcaggaggctgaggcagaagaatcacttgaacccgggaggtggaggttgcagtgagccaacatcgtaccactgcactccagcctgggcaacagagtgagattacaactcaaaaaaaaaaaagaaagaaagaaacagtccatgaccacactgggcaagaacaatggcaccaggatgccaggcaagactcagctaactgttcgcagggagctctgccacaggagcctcaggaccctaacagagaaagagacacactgcccaggaaagggacgcgcacagaaggttcggaaaacagcacttgcccaaacggtagactgttacactttcacccaatctgccttttctaatgtttcaacagccgagggactaaaatgtgaatgttacagtacttttcaatgtactgtttgaaaacacaggtgaaaaaatgtctccaagaagaaaaccaagatgtactgagcgcttcctaggcgctaggcatgctgctctgcgcttttgtgtgcctctgctcagctgaaacaaaacaaaccactctgtgtggggcaatttttaagcccggcttaaagatgaagaaaacgaagtgtaaagagactgcttctctaccacggccacacacaagtgagagtgaacccagggcctctcgcttaactccagggctgcctggcaggctgtgaggagaacaagcacgcttcttccttggttccaatgacctgcaaggaccgatcatccccagcttcagggacaagaagcctcagctcctggatatctacacacagcaccaaacacccagaatgttctgtaagcttcataacattctactaggcaaggttttctaaatttaaaaatgattcaagtcatgatgtaaatataaaattattaagaaaggcttttctagaccttaatctttaaaaaatgaatcatgcccttaatcccaagtcaaatgcattcggctctaagtcttagtcatagaaaagcctcaaaggcccctttgctccacagcctgcctgagtgctgagcaagcactgggcactgcagagcagccacgcccttcctgggccctccaaacagcggtgttgcaagtccctctggacattctgaggagcagccacagcaccttctcaggccacagccacgccttttggatgctgccccttgcagctctgcctgatgaacaatctcagcagtgctcttcagaacaccttaaaattccagtgtggcctgccaggggctgcaatgcacagcgaccctttctgcccccacttctcgggagcacacaactctttggcaaaaagaaaccatttcatttggcagtactatacttgccttcaaagaatgcagggagaaagaaaactaacatttcttaagcaccatacacatgcttttacatgttacttcattgaattctcataatagcttaatgctatcggttttcttcttaattttgggggcatagtggggagataagcaaactgataccccggaggttgagtgactcattcatggaatgcagcaggcccgtgagtcaaagcgagtacatggcaagaccgagtgaagctggggaacaatagccaagccaagagcgttttaaagatacttagcatcttcatcacactgaatcctaaggtgacagcacttccactcgacagcaaaatgtcagattcaactgtttctttccggtcttcaaacaaatatttcagaaattcagaaatcacctcacaagatcagttcataaaccttttgcaggtcctaagccttgagtggtgaagaaaaaacaaaaaccttttgcaaggacccactttgcatgtgccaaaaggtctccactctaaaatctcacactcttaggagtgacagtcacacagaaaggacggcacatggcagcaaatcctgggagagcagtgagcaatgggtgccatggaaactcagggagctcgcctctcaggaaaggtgtcctggaaatggggctgaggatgagcatgaaggaacaagggagcacagacagaatgaagccaggagaggagagagcctgccaggcagaggcagtgcagagcaaaggtgggagctggcaagtgcttgtgtgggcgaggagctgccctgttcccgtgtggctggggtgcatggcctgcggaaagggaaatgactgaaaacttccaaggagaagacgatgtgatcagactggtttccaccacggtgtagtggtcgcaaggcaggctttcgaacaaagcaaggctgggtgcagacgtgactccgccatttagtgggcatggaattgcagcagttacagaatgtcgctggccctgactctctcatctctaaaatacttacttccatgtcatagggctgctttcaagtttaatgagataatgaacccgatacacagccaacaaaaatgggaactcttctaaagatctctattcacaatcagactagaggacggtgtcccagagggcagctgcctttccggctctgcagtgcccatctcacctgacgatgggaagcttggtgaagggcaccggtggcagggtgaggccgccagggagggcgatgggctccatggtcccaggacacttggacgtatagttctctaggctttgggccacatctttcttttctgaagagaagatgaaaacaaaataaagatgtattaggcaaaagtcaaagtggctggctttcattttacttggggcatttcatgacagtccagtgagtccaatcttctgacagaaatgaaggggcagtgagcaaaagagaccagaacaaagcagaagccatattccacttattcgaaaatcaccggcactgctcctcttaagggcctgtggataaaagggaaattaagttagtatcctccaggagacttccattttccaagaaaataaacccttatcaaatttcaagaaagtctgtaggcaggactagagaatcagtatattttataacttaaccatactttttcagcaattactaggtaattaccaagcaaaatgccaggacctgtctgtccctcaggagtttgtaatttatctgtatgacagacacttaggcaaataattacaaatcaacatttttgatgcaaatatagagctttgtgagaaaagactgttgttcaccatcctgcccccatccctttcacaaggagggaggaaaagaggacacaggtgataatcatgtccgcttcctgtccatggcacagtctagacaggccacggacacagaccccttctcacccacagcatgacagagctcaggagcacctgctgtgctctaggactcaggctggctcaggaaggcaggcactcctgtccccactttgcagatgaaaaacctgagaccaagggaaattaagcagcttgtcaaagaccatgtacttggcctaaggcctgtggttttctccctagagtgttttaaagaattaaggaaaggatgggattatgggaggggtgtgaacaaggaagtccctccttgcagcatctagcttctctgtgaaataccaaagtgactgctgatggggaagacagaggacttggagagaagagcagcagagggacacgatcgccagggatgacacctagaacagcgaagttagatccgactccaggagatgccttggtctttccctatctactgtgctaccaccttaggggaagtccttcaacctttctgcatcttgtttgcctgcagtaagaggagtgcctatatcaggaattactaaggataaatgcgataatacattaaaaaagcagtgaatggcagatacggtgcactgaataaactgaaatgataataaccattatcatcattatcatatagctgcactggagtggacaaagagcaggtaagtagctgtaaagtgaagccaagtgctccactgaggctggtgaccataaataataaatatcaaggcaagggcttcatagagctcaggcacatgtattaattgttaaactgctaccataggaattttctgtgcctacgcattcttcttcttcttcttctttttttttttttttttttgaaacaggatctcactctgtctcccaggctggagtgcagaggtacaatctcagctcactgcaacctccgcctcccaggttcaagcaatcctcccatctcagccttctaagcagctgagactacaggcatgtgtcaccatgcttggctgattttttaattttgggtagagatgaggtctcactacattgcccaggctagtctccaactcctgggctcaagtgatccccccaccttggccttccaaagtactgggattacaggcatgagccatcacacccagcctccctcattcttaggaagccagagagcagagcagaaaagtgaccagaattacttttgaatacaacacaacaatgttaatctgaaacatgaaaaaagcctttaaataaccaaatcattctcaatctataaaaatctcccaaagggctccagctgatatcatgtatattatctaatttgcctaatgttaggcagagcacttatggttgaggtatcctattcagttgaattctaccaccccatacacactctcggtaaatgctgctgaaataaagggatctatttgtggtgcctcatgccacttgcaccgttatccaagaaaggaaaggcaccacagtgtatcactcggctaagctctgaatggcatttctagacagaaaataacgtacacactgagtagcacaggggaggctgcttcaccgcagcgtggtctggctgtgccatttcattagagaacccccgtgtttgtgctttaggtctggtcactatgctgtggaggaatgtcctatgtagggatatagcctggctgtgagcactctcagagctttgtggaaggccaggttggggatgcctcaatattcacttactccccatgagcgtagcagggcacacctctccgctgtgcctgctgactccctgaagggagtcaaatgctaatcttctgctggggtggaaaagggaccgtcgccagctgcaggggcagaagcgatctgcggatatgtaatcaattgtaaatgattttcagcagcgcctactgccgtgtggtgctcctgctagggacagggaatgggggttgcttcttggctttcccctactgccatatgaccccatcgccatttcagtggggtttctagagtcaaacgcttatgcccaattgtcagcatggcccatccagtgcaaaggccccatccaccttctcctaaaggattcaagtgtcggctataaattgttgccagatctattatttcatcaggaattacaaactggtgattttctaattctctaattcctctgcacttagaagctagaatttgtttataaggaaggattttttcctcatcaatcatttggttatcctggaacgcagacaacacagacattaataaacggttgagtctttccctttatttactgagtggaaaactattgccctgtgaaactccagtaatgaccaatgtgttttgtttattgtttagtatcattatatacctatggatttttatctctttgatgtttccattgattgttatcacatccttttttatttctaatggatacataataattgcacatatttctggggtacagtatgatgttttaatgcatttactgtataacaatcaaatcagggtcatcagcgtatccactgcatcaaacatttatcggttctttgtgataagagcattcaaattcctctcttctagatcttttgaaatatacctttttgtgaactatagtcacccaaccgtgcattagaataccagaacttacttctcctaactagagcattgtatccactgtccatcctctccccatctcccttctcccaaccatccccagactcttctaacctctattctgctaattccatgagacaaacgtttaaaaatttcacacctgaggaagaccatgagggatttgtctttctgtgcctggcttttttcacttaacatatgccctccaggtccatctgtgttgttgcaaatgacaggatttaattcttttttatggctgaatggtatcccactgtgtatctatatcacattttctttatccattcatctgctgaatggcacttaggttgattccgtatcttggctatttgaacagtgctgcaataaatgcaggcatgcagtcaccccttcgacactgacttcatttcctttggatatatgctcagtagcggaatggaagatcatacagtggttctatttttaagttttttgaggaacctccatactgtttaacataatggccgtactaatttacattcccaccaatagcgtgtaaagaaccccttttcttcacctcctcaccaacatttcatcttttgactttttgataataggtattccagctggagaaaggtgatctctcatagcggttttcatttgcatttccctgatgattagtgatgttaagcattttttcatacatcttttggccatttgtatgtctttttttttttttttttttggtgggcatgtgagatttaagggctgattttgagagataaaataagttcagtttctctataaattaatcattattgtcaaagacacactgatgcaagaccagcatatgagcccctgtgtcagattaacaaggtcttcttgaagcattaaccaactccttagtaaaggttataaagattataaaaagcttatgaaagttatatcttgtgttcaagattaaaattttatagtttataaaattttgaaaaacaaatttaattggtttcatgctattttattaggaaatattgtttggaaaattaaggcttctttctcaaagaacgaaggttttcacctttctaaaaaaatccttgagttattactttggtcaaatgaatgacttattttacaatgatctgtgatataagtgttttaaacctttgacctttccaaaatcaaattataaattatatctttttctgaactaattaatcctttaagatactaggttccctaaagtccaaaagtgacataatttgtcttatttggtataaaaattacacaggaaacactgtcaaatatgaaatggtgtttagttttctttaggctatatttacacaaatatgttattggtatgtgttccaaaatcatgggaaactcctataattctgatatgacttagtgtacattatcagtaataattataattgttatgttaaattattgtgtgccacagaggtaacaaatttccttatggattgtatctttgactatggctgccctaaaaccttttgtcatccacagacaattgttgtctgttttggtctttagaaggtggttttataatcagctataaaactctaccaggtgctgttgaatacaagtttctgataactttggagactgtgacatcagaatagaagaaaaactttcaggactcatggagaactgaaatgttcaggaatatcaagcagaatgggaattaactacagactgaactaatacaagactgaagtaatctttttgattttttgcttaaaacgttgctggtcctttgttttttcagagtcaaggaaacttttcttttgagctattaacagcttttaatgattgagtgtactcctatgaacaaaatttagaacatatttgtttcattctacctgactcttccagaatttggaaactatttgtgagtattcttaacacctaatttgttgagagtttttatcatgaagggatgctgaattttgtcaaatgctttttctgcttctatagaaatgataatatggttttggttcttcattccgttaatgtgatatgtcacatctatgttcaaccatgttcgcatccctgggatgaattccacttgatcatggtggaagatctttcaaatgtgctgttgaattttgtttgccagtattttgtggaagatttttgcatctaatcttcatcagggatatctgtcttttgagattagttttcttttgttgatggtgtgtctttctctggttttagtataccaaagtaatgctggcttcacagaatgagtttggaagtagtttgagaaaaattggtactagttctttgttaaatgtttcagcagtgaagccctcaggtcccgggcttttctttgatgggagacttcttattactgattcaattttcttattcgtttttggtcgttcagattttctatttcttcatgattcattcttggcagattgtatgtgtccacgcagttatccacgtcttctaggtcactgagtttgttggcatataattgtttgtaatagtctcttgtgatcttttatgtttctgtgttatcagttgtaaatttctcctttttgatctctgattttattgatttgacatttattctttttttcataatctagctaaaggtttgttaagcttttcaaaacaccagctcttcatttcattaatcttttgtatggtttttctcatctctatttcatttatttccactctgatctttattatttccttctttctactaaccttggttgagtctgttcttgtttttctaattccttaagatgcagtgttagactgtttatttgaaagctttcttcttttttgatgtaggcaccatctttggccagtgggagtcccttctggttggttcctgtgtcctttggataaggtcccattattctttgatccctttgtttctggttcatatccagccccaggcctagaattaaatcacttctccaaggagctctcattccctttagtggaaagaagtgtttagagactaaaacccagaggctagaagtgctctttgctactggattctcatggtctctgaagggctttacaaaggacaggacaacttacaaagttttcacagtgataagattataagtgatttctgctttaatttttttttaagtttaacaacgaaaaataaaagatttggactataagctccttaaaaggaagaaagtcatgtccctacccacaattacatttactgagcacttacgatgtgccaaatattgtactatgttctttagactataaaatctttaaggcaagggattctggtatatattaataacaaacttcattattttttatccaaaataggcatataataccctcttacaaaatacctgccaaagaagtggggaaaggcattatgatcccccttttaaagttcataaagatgaactcaggaacaaccctggacatttgattatggattggtatcaaatgtcaccaaaaaataattattaatgttttaagtataatattgtagttatataagaaaatgctcattttttagcaatgcatactaaagtatgaaggtctgaaatgatatgtctccgagattttctttaaaataattcagcaaatttaaaaagcaagagatgaagtaaatgtgtaaaagtcttgataaccactgaatccgggtgatggatatatgaggattcattttacaattctttttacctttatgtttgaaaatgtttcatagcaataatttttattatattttgacaaattatcattgcatgtatttataggatacaaagtgttatgatttttaatacaatgtgaaatgacgaaatcaagctaacatgtccatcacctgaaatatttaacattttttgtgataagaacatttgaaatttgttcctttagtaatattgaaatgtacagcactcaactcttagccatattcaccatgctgtgcaacagatctcaaaaaaagtcaacttactcctcctgtctaactgaggctttctaccttttgaccatcatctccccattccacttacctcccagcctctgctaaccaccattctactctctgcttctatgagttcaattgttttgaatcccacatataagtgagaacatacagtatttgtctttctgtgtttggcttatttcacttagcctaatgctctccagttccatccatgttgtcacaaataacagaatttcttccctttttacaggtgtatagtattccattgtgtgtacataccacattttctttatgcattcatctgttgatggacacagcaataaagtttaatgggcttggagaactgaaattattttctcatggtcatacagaggaacagagttaggattcagatcaagagttgaccgagtcttcctgttccaaaatatgaagcctgaccacatatacccagtgttaccataagaggaataaaaggacacaaggccgtggtggctgctgatgtctgttccacatgccaagctggagaaaagcttgtgaaaaatttgacatgttcacagcatatgatttggttagtgggaggtgatgattcctcaacttatgtcactaaaaatcaatccatcttcttccatttttgatcagattatccaacaatgattttagtcaaattagagcacctaatgcccttgaaagttattttgaactttttttttttttttttttttgagatggagtcttgctctgtcgcccaggctggagtgcagtggcgcgatctcggctcactgcaagctccgcctcccgggttcacaccattctcctgcctcagcctcccgagtagctgggactacgggcacccgccaccaggcctggctaattttttttgtatttttagtagagacggggtttcaccgtgttagccaggatgatctcgatctcctaacctcctgatccgcccacctcagcctcccaaagtgctgggattacaggcttgagccaccgtgcccggccaactttttgttttttttgagacagggtcttgctctgtcgcctaggctggagtacagtggcgcgatctgcaacctccacctcccaggctcaagcgatcctcccacctcagcctaccggatagctgggactacaggtgtgcaccacaacacccagctaatttttcatattttctgtaaagatgggtttttgccatgttgctcaggctggtcttgaattctgggactcaagtgatccacccacctcggcctcccaaagtgctgggattacatgagtgagcaactacgcctggcccaaacagaacatttttaatgaaagcctagttattacttaactatattgttcttacagaaggagaaaatatgatcaccaaaactttggatcagaaatgatttacggccatttaaatggacactggcttgaaaaccagtgcatcacgatttcacagttattcttgtctctgctaagtaataatcggagacaaccaggcttgcattcagtcagttatggtactctgaacaggtagagaatagaaagaggggaaagaagtacatcttttttttctaaatccagaaggaaaaacctaaggaagaaggaaaaagaaaacacggaggaaaaagtacaggtgtgatttgatcaaatatctgaagttacattttcacaatcgattctggtactttcacttatagaaataataccacagttagtatttgaatggttttcttaggaataatgatattgatctttcaacataacaatgctgaggtctctttggaggcttccactaagcagggctttgtcccctggtgtctacataagtggaaaacaaaacaaaaggaaaagatggagctgacgcatctttatttgtaccaacacaggctatgttgaaggacatgacctaaggttttttagaaactgaaattcctcactaacaccaagaactgggcagacacagcttccttcccagacacaggctgcactgaactggtcacccctagccccactcaggggaggccacgccaaacgtccagcacagagctgcagacgggaactcaggctctgtgaccaacgaactcccaagaccaagcagggcccagccaagtcaaatccagcacccggttatcgggaccaacagcaatcagataagtcactctgcctctccacatttacctagccaaactcccttcttacaaaagaggcttgagggtttgtgaagagtattattctccattaacaaatacggtgtcattgttatccccattttattactggcatacttgaggcctagggagaggaagtgattagcccaaagtcagaaaaccagtcatctgtgaagctggatctcaaagtcaggccctctacaaaccctacatctcacgatctttctacactaaccttgtacatccaatagcatcccactgtcatgaaaaggttactatcccattaagtgcccattacgagtacacctgtagcaacttccacttctagagcagcttctagcagaacagcactcccatcagtaacttaaagagccagataaagtgtcaaaaagaggagggggcactggagagtggccaagacatggaggacttgcaagattccagacagaagggaagctcgctgagaggagcacagttgcctgtggcaccacttcaccccgggagtggtgcagattctcaacaggggagaaccactgcctgcggcagagaagccggcagagcgctccaggcagtctcatggggctaggagagccatggctggggctggagccaccaagtgaggcagaccctgaggagccaggtgccaggaggagccaggagtagtgacagtgaacccggagctcagcatgagctccccctcgcttgttcccattcagctccgcaggacggaaggctgccaggtccatccaagactgcctcaaaagcagagttgctgttcaactctaaaaagtggcaccagatggcctttgcgcactaacaatgagaatgagatgcataagctgtaaaaggggcttcttgaaaaatccatcagagagctgaggatgcaaaggaacaggcatgagctaaattccaggaagcagcaagctcttcctaggagacagggcccaacagctgctttgtccctggcagaggagcaagagaagggagaattgggcagagaacgggggaaggagaaaagggctgaacttggaagacactttcaccgcctgcatgtaggtgggtgcaacagagtagactcccatgggcaaatctaccattctccaacgcctcctgcaggcttttgcagagggcaacgtgcagtacactgaggctgagggcaggcaggacagctaggaggacagtcccaggcactcaggacctcccctagatgcctggcagctgccacagaaatccaggcagggcagagagctggcagatgccctgaggggcactatgctttctccaagcacaaagcagaggcttgctgagcttggtagacaagagaacaaccgagattcctcctccaagaccatggctgccaaaggttagggccaagcagcaaagcttgaagaaacccctccaaggcatcaggacccttcactgagtgcaaggcagtaccctgtggaaggctgggggcaggaccaagagagagcccccaaaatgcagaaagccagagatagggctggagatcagagaaaactcccccaaacccacaaatccagcatccagtctcaaagcacaaagatggaaagctggtgactggctgcaaaccaaactccagtcttttctgtgcccagaccccaagccaacagaaggtcaaatcctgaccaaacacctgaagctaaagatgaaatgaccccaaggagagctaggaccaaggctacacccagctcaactgcagatcagattggcaatgccccacccccctggtggcaagccttttgaggagggtaaatatttactttatgctttttaatacaagtccaaaagaggaagtagtacaatatttgaagggggttatgttaaaaatgcatattataatctccagagcaagcactttttaaatagagatatggcttaaaaagccaacagaagccggatgcggtggctcacacctgtgttcccagcacttctggaggctgaggcaggaggattgcttcaggccaggagttcaaggccaacctgggcaacgtagcaagacccccatctctacaaaaaaaaaaaaatgtaaaaattaaccaggcatggtggtgtgcacctgtattcccaactatgcaggaggctgaggtggaagggttgcttgagcccaggagttcaaggctgcagtgagctatgattacgggccactgtactccagcctgggaaacagagtgagatcctgtctcaaaaaacaaaaaagccaacagaaaagacaaagtagaatacaagcatgatatcgtaaaatatctacttggcctttgactaccttgcctggcatacaactccttaaattcttagaatctccaaagtgatgtatgtttgtgcactgagttgaccaaaggctggcagtccccaggcaacttcaggataaggctggtcaccagaaagaccaaggcatgattagagccccaccacgggggacgggagagagactgaaagtcgagttgatcagcagccagtggtctaacgagtcatggctatgtcatgaagcctccataaaaacccagaaagacagggtttggagagcttgcaaataacagctaggggctcctggagggtggtacacctggagaggcatgacagctctgagcccgttctcccacacctcgccctgggcatctcttcatctgtatcctttgtaatatcctttacaataaaccagtaaacataagtgtttccttcagttttgagagttgctctagcaaattactcaaacccaaggaggaggcggtagaatctctgattcacagacagtcaatcagaaacagaggtcataacctggggccctctaagggtatctgaaagggtggcggggaaccgtctcatggaactggactctcaatctgtgggatccaacactatcttcagatagacggtatcagaagtaaattagaggacacccagctggtatctgttggaaaactgactgactggttattaaggggaagaaatccttaaacacattttggcaaccagaggtcacagaaattttctgtgttggttgtcatgttgagagaacagaaaaaacactttgagtgtgtttttccacagaacaaaatatattttattctcccaaataaaggcataaaaggagaaaaaagaagaggaaaaaaacagatatgacaaacagaaaacaaatacaagatggtagacttgaacccatccacacaaaactcgataaaaaacccaagatccaactatatatactttatactctcaggaaacaaacttttttaaaaaatatatttttttttatttgcataggttttcggggaacaggtggtgtttggttacataaatcagttctttagtggtaatttctgagatgttggtgcacccattaccctagcgatatacgctgtacccaatttgtagtattttatccctcaccccctcccaccctttccccggagtccccaaagtccgttgtatcattcttttgccttgcatccttacagcttagatcccacttacgagtgagaacatacgatgtttgattttcaggaaacaacctttaaatatgaagacacagactgaaaataaaaggatgggggggaaaagatataccacacgaacacaagtaataagcataataaacctggtgtggcaacattaatatcagacaaaggggatttcagtgtaagcaaagggatgaatggacacatttcaaaatgaaaaaggcaattcatcaaggagatacaatactaaatttgtatgtacttaataacagagctttacaatacatgaagtaaaacctgatagaaataagaacagaaagattcatgatttttttaaagttggaggctttaacaaccctttgttaaaataaataaaagaggccaagcatcgtggctcacatctgtaatcccggcactttgggaggccaaggcaggaggattgcttgagcccagaagttcgagaccagcctgggcaatatggtgagccctgtttctacaaaaaataagaaaattaggcgggcatggtagtacgtgcccatgggcccaactactcaggaggctgaggctggaaaatcacttgagcccaggaagcagagactgcagtaagccacgatcgtgccactgcactccagcctgagcaacagagggacaccctgtctcaaaaataaataagtgaaatttaaaaactttttaagtaaaagaatagacaacaatgataaggaagatttaaacaaactattaaataacttcttcaactgacattcatacaacactatacccctcaactgcagaatataagttcctttcaagtactcacggaaaatccaccaagacagaccaaatgccacaccataaaacacatctcaatacattttaaaagactgaaatcacacagaatatgttctgaccattacagtattaaaacagaaatcaataacaataccatttccacaacggctgcaaatacctgaaaagtaagcaatgcatacacacgtcaaaaataaaaacaaaagcgaaatgttaaaaatatttccagctgaatggtaataaaaacacaacaggtcaatatttgtgagatgtacctgaagcagtgcttagagggaaatttatagccttaaatgttcatattagaaaaaaacaaaggtcccaaaccaatatctaagtctgcactgtagaagctagaaaaagacataaaattaaatataaagttgaaagaaaataactaatgaaataggaaacaggaaacaataaagaaaatcaacaaagtcaatggttctttgaaaacaaatgataaacccctagaagagaaacacagatcatctatatcaggaataaaaaggaggcagatcctacgctcattaagaggataataagggaacagtataaacaaccatatgcctatacatttgacaaatgtggtgaaatagacaaactccttgggggtaaaatgacacaagaaaaaattgacaatcttaatagtcctgtatttattaaagaagttgaatctgtaatccaaactcccacaaaaatttccatcccagatggcttcactcgtaagttctgtcaaacatttaaagaagaaataatatcaatctcatacaaactctttcagaaaacaaaggagcgaatacttcccaacttgtgttatgaagccagcacaaccctgacaccaaaacctgacaaataactaaaagaataaacttagacagtaaaagtagcatggagtcttcagcagtctcacagaactaaagagataaacagcagcattcaggatccactgaggaagagagacccccccaaaaacaccatgagttctcagctggcacccccaaagcactatacaataagagtacaccgaagccttttaaaaactgcaatttgtatatctttattaaagaagctgatatacaaatggatacacaaatggaaatatacaaatggaaatctgatatacaaatggaaatccgggtagtttctaagaagtcgggggttactggccaggcgcagtggctcatgcctgtaatcccagcactttgggaggccgaggcgggcggatcatgagatcaggagatcgagaccatcctggctaacacagtgaaaccccgtctctactaaaaaaaaaaaaaaaaagaagaagaagttgggggttactgcagggaaggcacctaaagacctgtgcagtcattactttttggggaaccttccctggtgactctgccttgtgctccgctctgtcatatttggatttggtgatgcagaggcaggccacatagtgcacaggtagcctatgtgcctcataagtagcagtgatctagaaatgctttacatccccccaccatgatcaaaggacccgctttgcctgccaccacctacaatgctctgcaaccatgaccagtgattcctgacatactaatgtctcaacaacttattttcccccttcactcagacaaacatcatcaatgatgactttaagatgtacattatggccaggtgtgatggctcacgcctgtaatccctgcactttgggaagccaaggcagaaggatcacttgagctcaggagttcaaaaccagtctgagcaacacgagactttgtctctaataaaattcaaaaaaaaaataaattagctgggcgtaatggcatgtgcctgtagtcctagctactctgagggctgaggtgggaggatcacttgagcccaggaggtcaaggctgcagtgagtcctgattgtgccactgaactccagccttggtgacagagcgagaccctgtctcaaaaaaataaaataaaatgtatattacttattttctcttttggtcacaaaaaagaaacatgacatagtgatgcaaaaaacaatcatccaggccgggcgcggtggctcatgcctgtaatcccagcactctgggaggctgaggtgagcggatcacctgaggtcaggagttccaagaccagcctgaccaatatggtgaaaccccgtctctactaaaaatacaaaaattaacagggcatggtggtgtgagcctgttgtcccagctactcgggagactgagacaggagaattgcttgaacctgggaggcggaggttgcagtgagctgagatcacgccactgcactccagcctgggcgacaggacatctaaaaaaaaagacaagacaagacacgacaagacaagaatcatctgaccctcatgcactgctggaaggaatgtaaaatagtacatctgctgtgccaaacagtttggcagttcctcaaaaagttaagcatagaattaccatatgatccagcaattccactcccactacatatataccaaaaaccattgaaaatagatacttaaacagatacttgcagaccaatgtgcatagcagcagcattcacaatggccaaaaggtagaaacaagccaaatgtccattgactgatgaacagataaacaaaatgtagtctatccctacaatggaatattgttcagccctaaaaaggaatgaaattttgataaatgctatcatacagataaaccttaaaacatgctaattgaaataagtcagacacaaaagaacaaatattgtatgactccacttatatgaggtacctaaaataggcaaattcatcaagaggaaaagtagaatgatggttgccaggaggatcagaggagtgagaatgagaattattgtgtaatgcgtacagagattctgtttggagtgacgaaaaagttctagaaatggagggcggtgatggttgcatcacactgtgaatgtatgtactcaataccactgaattttacgcttaaaacagttaaaagggtacattttgtgttgtgtatatcttaccacagttttcaaaatcaatgtaaaaataatttaaaattggccgggcgcggtggctcacgcctgtaatcccagcactttgggaggctaaggcaggtgcatcacctgaggtcaagagtttgagaccagcctggccaacatggtgaaaccccatctctactaaaaatacaaaaattagctgggcattgtggtgggtgcctataatcccaactactcaagaggctcagacagaagaatcgcttgaagccagggagcggaggttgcagtaagccgagatcatgccacttcactccagcctgggcgaaagagcgaaagtccgtctcaaaaacaaaattaattaattaattaattaataacaataatttaaaataaaacagtatcacttacaagctcaaaaaaaggaaaatacttaggtagaaatctaacaaaatacgtacatgatcaatcgttgaggcatggttatgtgtcagatgtggtgtaaggtcctggagctttacataaaaagcaacctggatgagactggaaactatcattccaagtgagtaactcaagaatgtaaaatcaaacatcatatgttctcactcctaagtgggagctaagctatgaggatgcaaaggcacaagaatgatacaatggactttggggactcagggggaaagggtgggagcaggtgaaggataaaaggctacaaactgggttcagtgtatactgctcaggtctcagaaatcaccactaaagaacttactcaggtaaccaaataccacctgttccccaacaacctatggaaataattttttttttaattttaaaaaaaggtcctggagctttagagatgcttagctatgaccaaggaggccacagtctaattagcatagttataatttacgaattagggtgaaaggatttgatgctcgattggacacagaaactgaaggaggtagagacaagactggcactgagggtgacggctttggggaccgggtggaggagagccactggccgagacagaagcccaaggtcagaggaagggcagggcaagctcgtcggaagacagcagctccagcaggttgagtctaaagcaccggagggtggagagacccagactagggtaactaggaaagtataccgggcacaagcggacccctgagcaccatgaacatcagcagaggtaacactcccaggtagaatgtgaaggtgacaaagaaaaacagagggcccaaggatgacatcctggggaacacagaggtgaggggcagtgagaaacacatctggaaagaatgctagaggttcgagatgagactcaagaggccaaaaggtgagatcttctggaaagaaaagaaatgggggtggatatgagagaaacatctgttgggatcaccatacgtgagagttaagtggtcatttgtgaccttcaaaaaaactttcatccatgcaggaacccagcagcaacaaattaaaaatgggacaggagcagacaaagcgatggctcgtctcctagggagcacatggcatttcaagcacacacgacaacggtctggaagtcaagtgctgcattagaggctcacctgcattgccttacttaatatttacatttatccagtgagtcaaatattatcattagccccactgtagggaagagaaaagtgaaaatcagagatattataaatcttttcaaaggccacactgctagtaagtgaggctgagattttaaccccaggcttcttgaatctattgctctttctaccatattaagcaacctcctcggcatttttgtgctcatttcggaatctaaggcttggaaaggtcatgttactttcctggggttattaaggtaataagaagctaaattatattcaaactcaataccggccaggcatggtggctcacacctgtaatcatactttgggaggccaaggcgggcagatcacctgaggtcaggagtttgagaccagcgtggccaatgtggtgaaaccccgtctctactaaaaaaatacaaaaattacccaggtgctggtgggcacctgtaattccagctaactcaggaggctgaggcaggagaatcacttgaacctgggaggcagaagttgcagggagccgagattgcgccattgcactccagcctgggcaacaagagcgaaactcagtctcaaaacaaaacaaaacacctcaatgctatatgttcacgctttttgctttcttcagtttgtcactttgccaccgagattgccccaaaatgtgactgatatcctgaaactgccactccaacatgtccagcaagttaagcatcttacagagcaagagaaatcaactcagcttttcttcattctgcatatacatccaggtagcataatggtctacctagaaaggctgaaaaagtcacatgccaccactataaatattaatgatatgacaaaccaggagatatggaagaagatctgtcatgtaacaagaaaacaaggcatttccttaacagagtgtggattaacttagataaatttgcagtgagccacattaactgcctcctgtcaataatttttcatatttgctagtcacttaattttcagagtgaccagttggaggccctgatgaacaatcattcaagtgcaccaaaagactgaatatttttccttgttcctttcaggtttataaacatgttctaccaaaatgaaaggtaattgtgttaaaccatcaggtcactataaaaacatctatttcaagcactgcctagaaaaatttttaacatctctagagatcttaacataatgcccagaagaagaaattatattaagaagaaagacctgtactacccagagcaatctacaaattcaaattactttcttggggctattcatgtaataaattgctagattacattcaaactcaaagctttaagttcaaactttctgcttttttcattttgtcacgctgcccacccagactgccccaaaatgaaaaaatgcaaagaaaacacagatatcctagaactaatccctatcaaaataccagtgatgtttttgacagaaatagaaaaacaaatcctaaaattcatatggaaccttaaaaatcctcaaatagctaaggcaatcctgagcaaaaaataacaaagcaggaggcatcacattacctgacttcaaaatatactacaaagctatagtaagcaaaacatcatggtactggcataaaaacagacttgtagaccaattaaaaaaaaaaaaagaacccagatataaacccatgttttcacagtcaaataattttcatcaaagttgtcaagagcatccactgggaaaaagacaatctcttcaataaatggtgctgggaaaactggatataagtatgcagaagaatgaaactagacctctatgtgccactatatacaaaaattgactcaaaagggattgaagacttaaatgtaaaaaccaaaactacaaatctaatagaagaaaaacatagggaaaacacttcaggtcattggtctaagcaaagattttatggataaggactcaaaagcacaggccaataaaaacagaaatagataaatgagattatatcaaactaaaaaacctctgcacagcaaaggaaacatcacagtgaacaacaatctgcagaatgagagaaaatatttgcaaactattcatccaacaagggaccaatgtccagaatataaaggaactcaacagcaaaaaatcatcatcatcatcatcatcatcaccaccccatgaaaaagcaggcaaaagacgtgaatagacatttctcgaaagaagacatacaaaatggctaacaggtatatgaaacaatgctcatcactaatcatcagggaaatgcaaatcaaaaccacagtgagagatcatctcaccccagcaagaatggctgtgatcaaaaagacaaaggataacaaatacaggagggtgcagagaaaggggaactcttaggtgctgttgataggaatgtaaattagtactgttatgatggaaaacagtttgaaggttcctcaaagaactaaaaatagaactatcacatgatccagcaatcccactgctgggatttccaaaggaaaagaaatcaggatgtcaaagagatacctgcactcccatgtctaccgcagcactaagtcacagtagccaagatatggaatcaacccaagtgaccatcaatagaggactagataaggaaaatgtgctatatatacaccgtggaatgtgattcagccataaaaaaagaatgaaattctgtgattcactatgacatggttgaacctaatgtcctaaagggcattatgttaagtaaaataagccaggcacagaaaggcaaataccacatgttctctctcatatgtggaagctaaacaagttgatctcataaggagagagtagaggctgggaagggttgggggaaggaaggatagggagaggttggtcaacagagacaaaattacagctagacagaaagaataaattcaagtgtcctatagcactgtagggtgactaaaagtaacaacaattttttgtgtattttcagttggctagaagagaggattctaaatgttcccaacacaaagaaatgataaatgtttgaagatggatttgcaaagtaccctgaattgatcattacacatgatatacgtgtatcaaaacattacacagtaccacataaacatatacaattactgtatcaattaaaaatactaaaataaaaaattttaaagttttaaaaaaataaagataataaattattagaatctgcacatctaactatgaagcaatggttagataaactatggtacagcagcataatgcaaatttatgcaaacattaaaaatgacatttataaagactgcaacaatatggaaaatgttatgtcacatggaaaatcaggatacagaattatatttacaaaataaattcgatgtaaggaattaacccgcctgggcacagtggctcaaacctgtaatcccagaactttgggaggccaggtgggaggatcacgagttcaagaccagcctggtcaacatcgtgaaacccccaactctactaaaaatacgaaaattagccggacacagtggcacatgccagtagtcccagctactccagagactgaggcaagagaatcacttgaacccgggaggcagaggttgcagtgagccgagatcataccacttcacccaagcctgggctaaaaagcgagactttgtctcaaaaaaaaaaaagagaaaaagaaaagaatgaaaagaaagaaagcaattaacccaatttttaaaataacagaaaacaatacaaaagaaatacactaaaatgttaacagggcttgcctatataggattatgcataattttttcctgtttatgttttccaagatttctaaaggaagcatatattacttgtataataaaaactatatatatgtagatagctagatatagatatagatgtagatatagatatagatacataggtttttgttttgtttgttgttgttgttgagacggagtctcactcttgtcgcccaggctggagtgcaatggtgcgatctcagctcgttgcaacctccgcctcccagattcaagcttctcctgcctcagcctcctcagtagctgggattacaggcacccaccaccatgcccagctaatttttatacttttagtaaagacgggattttgcaatgttggccaggctggtctcaaactcctgacctcaggtgatccacccgcctcagcttcccaaagtgctgggattacaggcgtaagccaccgcgcctggccataaaaactatattttaaatgctcaaaattgaattttcaaaaaggttttacaacgaaaaatcagggtttgtttataaatgccccatgagtgaagaacatagtatcataaaatgtcaatggcataagaaaactttgaacttccttcatttccacaaaggtggaagtttaaagtaagggaatttatagcccttcccagtgtaacacagatgttttacaaacaacagctgcattgataactgacatttaatgaggtcttactacatgccaagcactagtccaagcactttacatatgccttactaaatgattcccaaaaccttaccaaaaaagtgccattgtttacagatgagagaaattgaagcttagaaagaactcacccccattcagttcagtgtgccttctacttctccaccacaatctctcatgtgtaatatgctcagccatctccctttattctaaaactatttcatatttcacttcatattcatttgacaaacaaatcttgaatatccaccctctataaggaagaagcctatcttaaatcgctcaactggagtcccacatcttcaagcacaacagcaaaatctcgtaattcctttgtctgcctggtggagtctcaattgatacattttaggaaataatttgagaaaggcaatgtgaaattaaatcagttccatggctcggcaaggtggctcacgcctataatcccagcactttgggaggccaaggcaggaggatcacttgaggtcaggagttcgacactagcctagccaacgtggtgaaaccccatctctactaaaaatacaaaaattagccaggcgtggtggcacatgcctgtaatcccagctactcgggaggctgaggcaggagaatcgcttgaacccgggaggtggaggttgcagtgagccgagatcgtgccattgtaccacagcttgggcgacagagcgagactctgtcactaaataaataaataaataaataaataaataaataaataagttccacatgtattgactactttctagtagcattgcccaaaatgataaaagataaaaggtgaacagacatgatccctgtccccaaggagtctgtaatctagtgagggaatcggataggtaaattattctgaaggtataataaaatgatgctgaattgagaactaagcaagataataaggaggtgcagaggaataaattaatttcttaataacaggaaacagggaaagtacaagaacagagcatgctacaatagaagcagcatgaaaaaccatgtgatacacttaaaaagcaaaaaatgttcagtgtatctgaagtataggttacatggatagaaaaagtatgcaatgagcctagaaagatggtttgactcaaatcgtgaatgtccttgagaaagatggtttgaatcaaatcgtgaatgtccttgagaaagagttgagactttactagatagacaaagggtagacactgcagattcttaaggaagagaatgtgatttagcttgcattctaaggaggtaactccggccgcaatgtgacgcacaggctggaaggagcaaagccagggaacaggaccatgatgtcaagagtctactgcactattccaagtataggtgttgagagtctgaaccacagtcatgaccacgatgggaagaggggaaatccccacatgagagaaactcaggcattagaatgggcattccaggcaattaataggatacaggataagtatgacaacttggggatgactgacaaagttttaagcttcccacactaagaaaatgccaacacccttaactcaaacgggaaacatagaaggaaaagagaatgaattcagctgaggatatggtaaccgcaggatcctatgagacattcaggagacaaatccagccttcattgggaaactgaagttcagaggtcaggagtggaaatataaccatgtgaaatcatgagcaaatttttgttatattttgaatatatcaagagcttcactcttaagtcccatcataagtcttcacaatttttttttttttttttttgagacagggtctcgctttgtcacccaggctggagtgcagtggcgtgatcccagctcaccaaaacctccacctcctgggttcaagcgattctcccgctttagcctcccgagtagctgggattacaggctcccgccaccatgtctggccagtttttgtattttcagtagatccagggatttcgccatgttgaccaggctggtctcaaactcctgacctcaagtggtaggcccgccttggccccacaaagtgctgggattacaggtgcaagccaccgcacctggccaacaatattttttaactttataatctcaatgactcactgtgtaattccttatttttaagaacctttttttttcacaactcaaattattacttttgatgtataactaacttcataatttttgaaaccaaaatttcttttccatctgctcagttttctcccccatgatgaagcatacttgtgtgtcacgtccctgaggtcacgggacttaacaattacagtaaaagccccttgtttatttatgacataatgatcacagttacaacaacaaaagattttgttcaacagatattcctactgtgtatagtctgtggctgcaagccagccgagattcccaaccctggcttgcctctgtctgcaccacgctctgctctgcggcaaatgagagacagctgatgtgaacagggaggcaaagaaaggcaacaccaaaactgagggccactggaaatatgtagaaaatgcaccacttctttcatttcctgcccttccccagccccaagaaacacagtaaaatgaggcgaggtccatctcactaagatcaaggccccagtaacgcacaccctcatccaaaccaagtccctgtctactctgacactgatggatggcaaacttttaacacattttctttgggctgagtagcaaaataatgagcaagcaacaaaatgaaggggtagctgaataaattacattctgacattttctatctcatccaatccttgtctttcaaacaaatgacaactgtatctaagttgatagataacctccttggtacagaaacaaactaatggaagtcatcagtgttgaaagtctaaccagggccgtgacgatggaaggaagaagacgaattccacatgtgataaactcaagcattagaatgagtcttccaggcgattaacaggatatggggtaagacaatttaaggatgactccaaaagctgtaagcttccaaaacttagaaaacagcaacacccttgactggtgtctgatgctggctggtacagtctttagtgggtgcagccccttgtcagtgtcggacactgagatccaacaaccactgagtaagtgtccttagctggctgcaggtgacccaggatgtggggtcaggcatgtgctccagagccaggcgcccggaactgtaatcccagctcgcacacgcagccgcggaagcccaccatgccttactgcctcctcctcgtaatctcagcctgcaatgatccctctaaccatgatgatcagaggagttcacacacatgaaggcacatgttacaccaggcccagcacacaagaggtgtgtgacaactcctgtcacacactctcacaggacccagaaacagactgcaggcaaaggctggtcactgttcctctacatccagaaggtgctgcatttgaggaaagataaaacaggaagaacattctaagaagataaatactggctgggtgagtgagaaaattaattaatcaagcttgagcaggccaggactgtgacatatgagccacagacagagaggatcaggacttgtcaatccagaaagcagagatagagaacaaggtcaccggcaagagagagaacaaacggactgcgactcatccagatgcgcctccctccggctctgccatgcagcacgtgggtgcgggtaccggatccacctgccctgaacctgctgcctcccccaccaaaatgggctgcctaggtgtcagatgggcacgtgatcagcggtgctgtgagagtggctgtgggaacagagggaggtggagccaaggcttaggagggcagttaataataactgagagggctgcgagatgaaccctcaggccctcagggctgtgcacaaacagccaagcaagcaccacgggccgggcaccctgttgcctggtgcaggtgttctggaggggccttccagaacaggctggaccccagtggactgagcagagagtcttctcccctgcaaaacggggttgtctgacagtcagtccaggaggagataaatcctgaacgttctaaagagggcctccgtattttattttataccaaggaatatgccatttcttcccctaaaacagatccctgccacttagaagttgctaaaaaaaattattaatttgaattaaactcaatgtctttttttaaatgacagccagaaaagtcttatttttctctctcagatcaccgaagtggacaccagcaagactgggtggctgcatgggccaaataactgtattctgtccccacgccatacgtataagcaaagcccacaaatatggaccagtgggcaaaggaggcacaggggaggtcttcagctgacatttcatatgtgtccgctccattaccacttccaaaagagcaacacaagcatataatgtactgtcagtcactgtggcctcctttgcaggtcataaaaattaattgagtggatagcgaccagcgtcccttaggatgggacaggacagacgagaccatggtgcatggtacaggttgaatcgtgtcccctccccgcaaaattcgtatattgaagtcctaacccccagcacctcagaatgtgaccgtgtgtggagacaggttcttcaaagagataatggaggtaaaatgagttttgctggggtgaaccctaagctaatatgactggcgtccttataacgagaggggattaggacacaggcacagaggaaagaccatgtggagacctgtcaagaagacggccacctacaggccgacgggaaacggctcagagaaaaccaccgccaccagacggccacctacaggccgacaggaaacggctcagagaaaaccaacgccaccagacggccacctacaggccgacaggaaacggctcagagaaaaccaccgccaccagacagccacctacaggccgacgggaaacggctcagagaaaaccaccgccaccagacggccacctacaggccgacgggaaacggctcagagaaaaccaccgccaccagacggccacctacaggccgacgggaaacggctcagagaaaaccaacgccaccagacggccacctacaggccgacgggaaacggctcagagaaaaccaccgccaccagacggccacctacaggccgacgggaaacggctcagagaaaaccaacgccaccagacggccacctacaggccagagaaaaggcctcaaaacaagccagcaccaccaacacctgcatttcagatctctggccttacagccacctacaggccaaagagaaaggcttcaaaccagcaccgccaacatctgcatttcagatctctggcctttggggccagaataacaaatttgcagtatgtgaaacatatggcaagattaatttttacagtatctaataattattctctgtcacttcacattgaagtgacagaaaatactaatcggcttgaaattatcaatcaaatctgagattcagtatctaatacagagatctttgacaagtgaatgaacatatatgagtgcttatttaatccaattcctacactttttataaaggagaaaactgagggccagggagaagagaagttcacacgtggaaaggctaaggataaagtctcacctcccaactcctcatctggtcctttgtccaaacaaacaaacgaggccgaaccctgaggaagacccatagtccttgtgcatccagcctgcatgcccttttccagttcgttccagtttccagatccaatactgcgtatgaaaccctaccacttcactatggcttcaattcaatcatcagaaattctgcttatcttattctcacatggtcctgatacagagatgcctacattttcatcactgaagtcacacttagcattaagtacctgcaacataccactgagataaacttttttttttgagactgagttttgctcttgttgccaaggctagagtgcagtggtgcaatctcagctcactacaacctccacctcccaggttcaagtgattctcctgtctcagcctcccaagtagctggaattacaggcgtggtgcaccaccacacgcagctaattttttgtatttcatagagatagggagtttcaccatgttggccacgctggtctcgaactcctgacctcaggtgatccacccacctcagcctcccaaagtactgggatttacaggcatgagccactgcacccagccaagataaacattttttaaactaaattggtcagttaaagattagagtcagagtcagacacagtcaaaaataaaggctcccccatctgttcccacctggctgagaaacaatctttgggtaacaatcacctgcagagaaacaatcttttggtaactttagctcgttactctgttgctaaaactttcaataatacccactgaaagcctaacatttcaccagagagatagaaacttttctttctaacttagagacctaagtaaaaatatgtaggtctcttaagttagaaagaactgtacagcctcacccgggaaactgcccacctgcctagtgggtgaagtaagcaaacacaccagcactgttgaaatcccactgtggcaggcacaatgccaggcagctgacacattctttctgataaatcctccacctaactaggcacaatcttcttatttttgcagttgaaaaacaggcttggtaaagtcagtaaattgtcaaaggtcacatttgataaagtacatgagccaggatacaaacccagctctgcctgactttaaagatcacagcccctactgtcctctgctgaattaaagcatcatcgtccccttcctacacatgcagtagcccaggcccaggggcagtcagcatcttccccaaggccactcaaatacccatgaatgatatgcatacctcatcaaaatagaaaactgtgagactctttaagagcagcatatgctgaaacactctttggaagtcacgaacaaatccacgtaaccaacaacaattactatatattgagcacaggttctcaattgagaacaggttgagaacaggttctttatatacactgtttctaatccttatgacagcacaggaagataggtattcatcctcatgttactgaggaggaaacaacagcagaggaaaaaaaggcaactgggcttattaagcatttattgagcctctatgattaggctgggattaaaaacacaaaaagactacattccagctgtcccacctcacacctcagtccacagacatgaaaactaaaaattaatacatatgaaatataaaaattaatgtgtaggccctgaaaaagccagctccacaggatgaatccatcctgagtggctaacgggacctacattcaagttagactcaagcagccatctgttgactagaggtcacacacagaccttgagttcctggaaaacccacgtgtctgcttaacttaggggcctacatagctgcctgttcccattcatgccatcaatagactgtgacctgcaacaaccaatcagaactcagcaagtctgaaaccttcaagtacataagtgaacctgagtgggaacctgggcgggaactttctctgtaaaagacaaacctttcttttgttctctggaatggatagcttcagtttgcatcaaaggctgttctcctcagtttgtaaactattccccagaataaagtctcccctctaaagtccttttcagagaactcatgttcacaaatgtgataagcattgttatatacgcatgggaaaaaaaaaaaaaaactttgggaagaaaaaaattttcttctaccaaaaggtgtcaaggaaaggggctggagggaagcacggagcacgggaaggggggctagtgctccattctgggtagtgaaaagccagaagaaactcacagtacgtgtgtgtagagcctctgctctgggcacagcagctaagtctctctcccaagctaaggaggcggcctgggccagactgaaagagcagtgcacaatgtgtggggcctttggcctctgacactatttcagcagaagattgctgcagataaacacctgctttagaaagaaagatcactttatcataggggtggaggacaggaaagaaagggcggatctggaaggcaggaggtccctcaggatgagttgccatattccggaccagaagtggcagagtccaggctgagtaatggtgtcttggcactctgtgcagcagatggtgggcgggcaaacggaaagcaggactgcactgcactgctggggagaggacaccacctggagccacgttgtcccacagagacaagatccttcgtgacattgcagaaggtccctttcgataccaccctgggatgttctattttggttcacctaaaacctggcaaattagtattttcctataactagtatatccactaatatatttgggattttgaagtactgatagtttttcttcacctcactattttacatgtgtggtttctctaccaagcaggcattttattagcaggtacttattatgttgtactacatgatatttatctcttcaacatacaactaaaagtacatcaaaagcttcccttcatttctgctggggttttattcaatcccttctctctagttctgaacaaacaaaagggattgcataaattgcaatggaaacaaattatacccctttactgacaaactcccactgggattccttgtaacacagcaatgcagatgcataccttctccccagcccagtgaaaaatgaaatatagcaaatcgaaggtccaaagaaaccacataagccatctggagaaaaaaatgcaagggggaaaaacgcatgtcaggaatgaaaaataggaaatatatatacatatatccttggcaatacaaaaaatcatgtcattcatttttggccagagttcgtattttagctctttatgctctgctatatgaagctaagggacaaaaactcaaatgtgaagtctgcatacttcacaatgggaacaaaatacaatataggacatcaacatacgacacgtagggctttcaacccgaaccccgtatattttagtctgttaatctatacaatgggaagcttgcgatcactatggccaaattctagcaaaattccaaaatccagcaaaaataacacattattgttttaatactattttagaatttactgaaattcaaaaaatataaaggacatatattaaaatatccaagatgataaaagatgaccagaaaagcacatcacaattgaaaactcctcataagtgaaaagccagcatggggtaggaaatggaggggtggctctggccctgtgtggtcctgagcccagcagtgctgggctgcggcctcaaccctcactctccaaggatgactgctgggctgaagcccatggcatgcatatcagcctcggcatttttcttttcattaaaagtgtttcactaaatctttaaccaaaggtgatacagtgttttgcattacttttcaaacatataagtttacaagccatgagaaatctcactgggccacgtcgtgaatctgacttgggaaatactgccacccacagaggcagggccgcgaaaggacgcagaattcctctaggggtgacaaggcagcaaaggtgactctgcacatttcacttcctaaccagtcaaacgataagtgaggaggggaaagaagggaggctggttttcagaaacagacaaagacccacagaagcccttagttaaaaataccccactagtaatttccacttgtcaaagcctgtgtctcagacctggcacacacctcctgtcctggcctccccggggtccctgcaaagcacagattcctgggtcctggaccagggattctgacttgataggaatggggccctggaactggcattgtaaattctgaagattttctttaaaaataaaagcattgtccctgagaactaagtcttacttgcacaaaataaccaaatccacacccagctgagtgtggagggcagagggagagaggaactaacagctgtctgagcttcccaagccgagacagagtggagggaacggtggaaatggaaccagctttaatcctcacacacaccctgttatggtctgaacgtctgtgtccccccaaattcacgttataccctaactcccaaggtgatgggattaagagacagggcctttgtgggggcgatcagggcatgtgagtagagttctcatgataggaggagttcccttgtaaaggagatcccagagagctccctcgccccttccagcatgtctctgagccaggaagtggccctcacaggacacaaatctgctggcaccctggtcttgaacttccagccccccgagctgtgagaggtaaatgtcccttatttataagccacctagtctgcagtattttgttaaagcaaccagtaaagatgcaccccaggaggtgggtccttcttgtgccccttttccaaatggggaaaatgaggtggggagaagttacatgactttcccctgctgcacggggagtcaacagacatttgctgagcccctgtcacacagtgctccaagccacagagactgcgcaggacggtggcacgcctgccctcaaggagcctccatctagcaaggagggagactgatggtagcgccaggcagagaagggtgggcgtttggctcagaactgaggtgcacagaaatggcagccatgccaagacccagggggaagctgttcatgcagaaaaaaacaagtgcaaggtcccggacaagagccagaaatcaagtttgttttctcagagacacagaaacaagacaaacctggctggtgctgagtgaatgtgcagaagactggagagaggtgagcaaggagaactgaggagaaacatcaggtggacctgggaggcctccaaaaataacccggctttccctccacttcctgatacgtgtcctgggagccaccagggaggttgaagcagaaaggtgctatggcgtgaagccgtggtcatatctgggatgtgctgaggcagtgaagcctccaggacttcctgatgtactagacgtggggcctgacggcggggaagccacgacagcgtcaaggtttctgcccaagcagtggggcgggcaggggcaccctgcgccctgtgctgagagggaagcgaaggcagggtgggcgggtcgacagtcaggcctgcagcaccccagaaggaagaagtacaggcaccatgaatgcaaagaccattcctgaagccccagggccaggtgagatcccccagcagaacatgcagaagtgggagagcaggcagggttgaggaggtcctctgtgtgggtggtgaagccaccaggaacagagatggggtggaggtgctgaggacagagcaggccaggtactgagtgaggagaagtagccagtgcacctggcaatgaccacaacacaaggaaaggcaggagccatcaatcctaatggtacaccctcccaaagagctggagtgttctgaggaggactgcttggaagtagcaacggaaaatgatgcccgtcccatctctgggccctgaggtcctgggggcagaggagaaaaaccagcatgcatttgagagaacagcagggcaggcaggccaaaaaaagggctggttctcatctcctcggattgctaggatggcattgtgagtgggacagatatgtattggccggcactgggctatacttgcatttcacttccctgtcccttccgactaaatgctggcgacaggccccagtcacagttatgccagaaacactcccacacatttccaaacttccctgctgaagagccactcactccatatgagaaggttaagggaacactcggggaggaagaggatgaggaaatgcaggagtcagctaccaaaagacctcaggttcctgcagtcaccacggaaggggtcacgggagcaggaagggatgggaaacggggctggggtggagactcctggagatggaccacctggggcctgggccgctgacagaatggagaggcacagagatgtggccaccgtggacatccggggagaccgagagacagcagctgaagacccagggaaggctggacacagccctggggttggggcagatgcaaggggacaacccaaaggggcttacgggactggaagagttaaggaaacaaacacatcctagtgttcaaagccagctctgccacctccaaatccatactcagacatgcaaggtaggatggcaccaaatagaaaccgagccttcgacctaaggaagctgaaacacgtgaaactgcctggagtgcatcggctggggagggtgagggtgtgggaagcagcagccaacctcggcttctcccagttgctccatctccccagccagtttctccaggtcatccccaaaggaactgcgtgcccctcacactgctgggattacgcacagtacccaacttacgcgagatgatccacaaatacctgcagaaaggatgtaaagggagcggctgctcctgtgcagattttccagctcctccttgtcccttattatccgaacagtactcctagaacccgtcaaacacatcctttggagtcctgagggtctactaaaattaaatgctcagctcaaacaccacaattttacatgcaaaaaccaagatttttaaaggagttagttactttattttttcttatgcttttcactgtccaattcactctcattcagaaagcctcacataatatcagatcaatatttttctatccaagatgggaagagggaggaggagaattattagtatccctgtctaacccatctaactacacctgtaaggatggacttgccaaagagaaaacaaaacaaaaagttgtttcaggtgttaaaatttcaatcaaatatcaaatatgctagagagagatgcaaagaaaatgaatgatttttcttgatggggatttatctcctgcttcctaaaagtggacttgagattcacaccagaaattaaaatcgtcaccactgtgtccactcggctgagttggaatgacacttcccagcccctcgctgtgaagctgagtcagcacatggagtgatgtctgaggcagaggcacggggtagcatcggttccggggcccagggcaggacacacacccacactggtggactgggcagcatcccacccatagctcctctgctcctccagctctgggccaggcacgcatgtttagcacggccgcaaagggcaccagcctctcctccaggagcccccaccattagagcgggaggctgggaggtggtgagaagctgacatgggctccaggccatccccatggggtccagctcagccccacagttcctagcttgtccttgcttccctcccttcacatccgccttcccttcccagccacctgcctgcctcaggccttctggatccagcagcagacaccgaaacgatgcttcacaggcctgggtagccagctcccacagcacgtagcccaatcccctataagaaatcctatctatgtgtgcatatgtatggacatgtgcactgacaaagactctccttgaccaaacttcagacaagctcctgtgagtcctctttccaacgaggcctcatccttcagccctgtcctcagcctgcctagcccagtttcaacaagaatcccgggaagtcatcctgggcctccctgttaggcaagtttagcaagaatcccctacacttaatgtctctcctcttagtaattttccatccactgaccccctcactctgctcattggctataaagccccacttggccttgttgtattcagagctgagttcaatctctcctctgttgcaatagagttgactcctactgtagtagtcttaaataaaattctccttaccattttaacaagtgtcggaataatttctctttgatggtgtacatgtatgtctctagaactgttatgaatacagtgatttttatagctgtctcataattttccaggtggtacttcttccttttccataagtcctctggtcaaaggctgttttgaaattgttccaggttcaatgttcaatgggtgtcttttccttcaaagaaacataaacatatatcatcaccccaccaccagggaccaggagcactgggctgagaagaatttgccatcggcaactccagcagctctaagaagggcattcactcagatgacaactgaacaaaaatgtcagtcaaaggtgccatggcaagtgtttccccctttccgaggcgctgggacgccaggggtcctgctgttctgccactcacagctgactggataactgggtgactgtgggcagaccacttcattcacatcacaaagcacgatggcaggacaccatctgccccatcaaatcccaactaagtttcagtgatagtcaaatgagcaggagggaggaagcaatcagaagactggaaaagaacttcacataaaagagatacaacaaacaaacctgcagaaaaaatccaaccttgcaagtcaccaagaaaacgcaaattagaagagtaaggcagcgttctgcacacactcaattagcagccctgctgctggctgcatccagcagtgtctcaacagcaatcacaacgctcaaaaaggctgacccaggaagccccctcctgatgaaaactctctcctgctaaaaaaaaagccaaagacctaaagatgttcaccacagtgttatcaacagtaccaaaaacaacctgaaaagcaagcaagaaagggaacaaaaaaaagcatgtattattaatgcattcaactataggtgactgccaacatgtgcctctagctagctgtagggtgtggggcttcctttggaggtgataaaaatgttctaaaactgactgtggtgataggtgcacatatctgtgaacatgccaaaaagctgaagtgtacattttaaatggcatctaaaggcatgaggccgaggggaatcaccagacactgggagcaaagagacaagcggaggcagaaccaagccctgacgcaagcgcccagcacacgggaatcagaagtggggaagttccaggatgagctgggaaaaggaagaaagcaccgtgtagaggaagcactggactgagagaacactgttgacagacagaaaaagaggacaggaaatgactcctgctttggaaactggtgaccttggcaagggagaggagagggacgtccggcagagggggctgaaggggggcgtgcgagggaagggcaagcgggggggctgaagacggcgcacgagggaagggaagggcacacagcgggggccgatgggggcgcacgaaggaaggacacaccagggggccgaaggaggcgggcgagggaagggcacagaagggggccgaagggggcacacgacggaagggcacagaggggggccgatgggggcgcacgaaggaagggcacaccagggggctgaaggaggcacgcaaggagagggcacacaagggggccgaagggggcgcgcgagggaagggcgcgcgagggaagggcacacagcggggccgatgggggcgcgcgagggaagggcacacagcggggccgatgggggcgcgcgagggaagggcacacaggggggccgaagggggcgcgcgagggaaggcagacgaccctggcagaggttccgcttcagagcggaaggttgcttggcttggctgggctgagctgagctgcacatcgtggtaactacggcatgtctgcacacagggaagccagtggggtgggagagagggaggcggcaggagggagcggggaacacggagtgggcaggagggcatgagcgcttgtgccatgggctttgcggcccttccgcaacattccaatgagacaccaggcctggcgaagtcaacatccgcccccttccagcagtgccccttaaagcatggcactgcaccaagaataggggcgggaattggggaaggtgaagaagacctgatgagggtaacgggctgccaccacgtccaggtagcccggcaacggtagcacagggtgtcaggctgcagaagccacctctgcccagcaatgcctctctcactcagctacacggtcagcagatgatttacatcctctaagtgagtaaccaagccttgctctgattaagtaatccttcccttaactcccttttctaaaaacgtcttcacaatcatctaacataactggttccctctgccacaaagtcaagaagcaccttttgagggaacagtgggatctgcggcagccttggttaggaagacgcgcctttccagcaaacatgcccactaaggtttagaagcagagatgctgaattctgctctgaaaataacattttctgaagcaacaaactttgctttctttcaaaataattgcagtgattatttttggtctcctgtattcagcgacgtctgctgccacttccaccctccatcaaggtgactttgatagagacaagcagcccatgacaagatgagtgacctgcaaggtgcaatcaccagtggccaccccaggcaagtcccattagcaaaccagatggggaagtgacatttagacttctcctaaacagccatcgcaatgtgacagggacagtggcaaagcggtgtgcaggtaaatatcaaagggaggctgtccatccatttaacagtatttcttcacacctactgtgttccaggccgtcccaggacaaggcagatggggtctgctagcctctcacgttaagactgggaaacgcaaagcggcgggtatgatgcagaagagccgggggtcacggtggtctcctggagaagacggcactggaggtgagccctcatgcagaagcgcaccgttcaagatcgcccaggaacaggcatgtggggctctggggtggaaaagtcttggcacgtaagcattaattaaggaagccaaaggaactggaaccgggagcagacgagaaagtaagggacaaggtgggagagagggcagggccgggggcagaacctgcaggccacactgagtcctgggttttattacaggagcaacaaaacaggatctgatttgcaatttaaacagtaactgtgaggggtgtccggagaatgaagcaatgggaggctggagtggagcaagggagaggggcaggaggctccagaggagatgacggcaaattaaacagaacgaaggcagtcagggcgagaaagcagaagcaggctggctgggcctctcaacgaatccaaggtgcagaggggagaggatggcagaaaaggtgattccagggctgggccggaacaaccgcgtgggtagtcaggtaaaggatgaggaaggagaagcgacaacggatgagagacacaggcccacgctagtcgctgactgtgctgccattctccccgcacccctccagccccccacgctgcctgcccctagagacaaagacggccaaatccattcagcccttcctagctgtagcactgagcccatggattcaaccaaccgaggattgaaaatatttgggggaaaaaattgcatctgtgctgaacgtgtgtagtttttttttttccttccctaaacaatgcagtagaataatggcttatgtaggtagcatttacattgtatgaagtgttacaagtaatctagagatggcttaaaccatataggaggctgggtgtggtggctcatgcctgtaattccaacacttcgggaggctgaggcaggaggactgcttcagcccaagaggacaagaccagcctgagcaacaaggcgagacctcatctctgctaaaaataaaaataaataaataaacaaactatatgggaggatgtgtataagttatatgcaaatactatgccattttatatcagggacttgagtatccctaggttttggtatccaagagagagcctggagccaatgccccctgccaatactcagggatgactgtgcttcccatcacgcttacagtgggctggcatgaccacatgatctggttctagccaatgagacagagaggtctgctagagactcttaaaaacttttgtaacagctttgttgagatataattcacatagcagttggcccattaaaaggtgcaattcaatggttttgaggatatcacacagttgtgcaacaaccaccacaatgtactattggaataccttcaccgcctcaaccccataccctttagccatcgcccccacaaagtcccccattcccccagtcctaagaaagactaatccattctgtccctatagtctattttggtcatttcaaataattgagatcataaaacatgtgtgtggaattcagagcctggcttccttcacttggcattacattttaaaggatcatccacaccacagcagggatgagtagttcacttgtggtgtggctgcacaaccctgtgagcattctcatatactttagatggataaattgtagggcacatgagttagctctcaaaaacttcttttattttagtaagacttttggtttcttgtaggtaaagcatgacagcagctatggggagagaggcactgcatagcgacagttgtttcggaagtttaagatgcttaaacaacctcaaggtctaccagcaagtcagattcgtgttggataccatgagacctgggattctgtgctacttccgctgaacgaggaactggcagcctaatcttgatccacactttcaagggcgaggtggagaggccaccttcccaacaccttaggactgggctgaacattaaacgcgggggaaacagcatgcactgaatccccggttacactggccgccgctccctgcctgaagaacacctctgggtggcaccatcctttcctttcccttgctcctcttcctctgtttccacctcccactcaccccttccccaggccagtcagagcactgctagagttaattacaatattataagacaaattataacagcagcacatcttggaaaagaatcacatccacatctgacagccctttggggtgattctgctgttccctatttctctctccgagtcttcttaaggtaaccttgagcaaaagaaccactaatgtctgaccaaggagctggcgtccaggtcccccagaaggaaaacagtgccatcttatgatatttactaagcacttcttggcagcagacattgttaggcacttcaggtgtgtcatctccaatccttaaaacaatcccacaaggtagacgcaaaaaccaagacacagatagggttttcgagaaaacaccatctacccagaggcctccagaaagacactggaccacagtagaagaggtaaaccaaaagacttcagatcccaacaagaccaagcccaggaaatcatgtgcaacgcaaaccatctatactctagcgtgagaacatcacactccctgccatcctaacctggtaaagtcattccaacagcagaaatgctgtgaaataaggcacatccttaacacaggttcattcactggccccctcccatctcatgggacccccccctttcgtcactcctcagtcttttcacagtagcattaatatgacctatttatagtatgcattttttccccttcttttcgtaagtattgataaccgcacttcactcacagtagcagagcctacatatggttgaaccttactcgctcacctggggcttttgatcccagtccctgaaacagtttacctaactagtttttccccgtgttccctttttaagctacgtgatgtgaaagccgcgagtcttttttattttccacaggaattggtgtcagtaactgtaaattcatcctgaaacggccagcgcaaggatgaccatcaggccgcgggccagacctggtccataggccacggtttgccaaaccctgctcaaaagcctgaccaaaggccacagcaggatctttaaaattgccagttagaagaaatatccatttggtagcatagtagaaggtgggtttaaagagacagaagacatcattcattcagccggcatttaaggacccgtaaggtaccaggtgctgctccagatatgcgtgacagttggtgtctttgaggagcttagaggcttgctgggtgggcaaacagaccaacacctccacagcccagcatgctggaagctctgacagcggcaggcacagggcacggggagctcccagagggggcactgcagtcatggcagggatgaattcctggacaatgtgacagtaatggaaacggcatgtacgaaggcagcagaatagcaatgctgttgtatttggagaactgtcaacaatttagtacggccaaatacagagtgaatgtgagagtgggaaaagatgagtctggaaattacaaatatgtgccattctaaacctttcacaaaggaaggaatccctctgcccttttaagagactcccatgcagttcacaggaccaggtttgcatgcacaacccatgaggcttcagaggatgacagctccattaatctactgctggaatgccacagaagctctgtgcccacacacatgggaagcctcaacaaagatggccctgtacccatgatcagaaaagcaacacagtcacggttcctaagaagattccacaaatcatcagggtagtacatcatcttgtaaaaaatgaccaaagtcttggagaactcagagcctttccatgtaaatacttgccctaataacgtatcttgtaggttcaatcttttgcaaatactggagggtacacatggagcagaaggcccccgatgatgctgtcttcaactgcacatcaccagtccagcttcacaaaggacaagaaagctagaaagaccctcttcaaccctggggtcacgtttttccattcctggctgctcttctattccatactttatttcaatgcagcaaaatttagaaatgttagttatcaagtctgtgaatagcaccatgagctcttcagcaaaaaagaccatccaataaattatagtatccatcattaaaaataacaaaccgccacctagccctgcacaacccagctgtccaaatgagaaaatggaggctggggagaatgtaattattgatcggaggttacagtaattagaggctgagatgagtggaaagaacctctcagacctcctgacttttgtccttttctcagacgactccaattaaccaaatatcattatataaaggtctttcaagagactgttatttgttcaacagtatcaagtgtcccaagttcttctccttttaaactaagtgtctttaaatcactaattaatatgactttaaataaccataagacactatcagcatttcatggataaacaaattttcctgtcacctaaaaacatacagcttggaccccatcaatcacagtgtgcgtccccttcccaggacaaggggcacctgacacctctagagggttatgctgccttttcatcaaaaatcaaacgcaatttatatctaatggaaacacagcccatatggaagcatagtgatttcgttctctgttttctcactgggaactaacaatccaccaaaagaaagcagaccttagaagtacatcatgatcacagctcctcctctcttttcccatcaaccgcctgatctgaaatctagctgagtctggttgcagctttgtcagtcatccaaaccgagatgatgaatctctcctaactcactctacaaataccatggatcaaaacttcctaccatgactaattcaaactcagattttaaacatatattctcctccagtatttctggtagaccttaaaaagagaaaaagaaaaaaaaagaaactatcctcaggattccagcatggagaagatacaccgaagagagatcacagcactgggggggaattaactaagggctctggccataaaagcaatggccagtcgtgaccatgtgagggagacaagcagtctaatgggcgagccacatccaacttgaagcctccgtcctcacttagggctggtgaagaccacaggctgtggttaaacatgtcgtttcaataagagttcacatttacatattttacacacatatattaaaagagcctccaatgtgacctgttataaaatgtctaattactcaaaaatatagcatacagatcaccctttttgaaagatcacatgaggaaaaggtacaactatcacaataggcttagaagtgaacaaagcttaaaaatataaacaggataagaaaaaacggtggggaaggcagaggttaaagcatcaatgagaaccctcgctgtattttcctgtagaggttttctttgccacctggagaaaaacgctgacactgagttctggacaggaagggcaggggagataggcaggcacacacccaccaccactcccaggcacggggatgctcatcaacaatacatgaatgctattaataaaaaaagaaacacagcaacagagcaattaacagagagccctatgtgctcgtccactctctgttcttcccggcggccatttcatggacacacgtgtaaacatcaacctccgagcacgtggggctgggaaacacaatctacttctcagtgccgtcatcaaaataagacaaggcctcacatgtctggagtggagacagtcggctcatcagcctgacacagaagagtggaatgggtcactccaattattgatcctgcatacacgctcagtcatctcaccatgtcccatggaaaccgcagggtacccaaaggggaagatatggcccatgcccttgagaaatacaaactccaacagaaaaacacgatgcagcatacgtatacacacacatacagtgtacaaacacacatgtgttccttgtaaaaagaatgtgctttttttttttttttgagctggagtctcacccaggctggggtgcagtggcatgatctcggctcactgcaacctccacctcccgggttcaagcgattctcctgcctcagcctcccaagtagctgggattacaggcgtgcaccacctcgcccggttaatctttgtatttttagtagagatggggtttcactatgttgtccaggctagtgtcgaactcctgacctcaggtgatccgcccgtctcaccctcccaaagtgctgggattacaggagtgagccaccatgcccggccaagaatgtgcttttgaaaaatgtctgaggacccaagtcagaatcaacttccccataagcaatcacgatgaaggcaagggctgtgacaacatcactcacacctcagcagccatgcacttggcatctagcctttgccaggtccagctccaggtagacagcaggcagaatgaggttttctcccatggagggagacaagcatggaccaactaaatacgtaactgatgaccgacaagtgcaggaagaaagagagcagaggcccagagtccctggtctagctagggacttgtgaaggctttcaagaggaggccaggcccaagaggagtcacatggtgaaggggcagggtgtggggacaggggaggtgcaccggccctgctgtgggaaggaaggtgtgtgctgaagaagttcaagatgcagcagacacagcaggcgaaggagtgacactgacggctcaggcgaagggctcagggccgtgtcaccacaactcaccaaccgtggggactgtgcttactgaggtgaggtatgtggggacactgccaccaggagagaacagagtcctggctacaggggcagagggacatgccatgggtcagggatggcacccgagattctaagcccctacacagagtccaggcactacctctttagatttgctggatcacggggaggctcaagaaattccaggggagtaggggaggtgggcagcactcccaggggctggggagagcaaacattcactcgagcaggtaacaccagaccactgcccaagccgccactgagccacagtcaccccagcaggagacacgggtggctctgggagctctgcctcggcctgctgctccctcccgtcaccgaaacgccggagtgcaaatgggccatggagccagcttccacggtggccctgctggccacctgctcactctgcaggtacaatcaagaaaagcacagttcaaatgcagccccaaaagcaacagcgacccaatacacgcagaaaaggagctgcacggctgtcgcaggggccccggtcagagcagagattcacttgggtcaccagaagtcctcaacagaaaacaacagctactccacacgaggatgccaacggccacaataagtggtgtgtgccttcagaaccttggcaacaaagaaccacaggggttcacgaaaggagaattcctttctcttagagatggccgtggaaatcactgtagggaaatcaatgtttcctttaaagaatgctagtgtttcaacaggtgcagtgagaagatgggctttatgaggactgcttaatgtatactaggtttctttctttctttttttgagacagaatttcactcttatcgcccaggctggagtgcaatggcgcaacattggctctctgcaagcgccactcctgggttcaagttattctcctgcctcagcctccttagtagctgggattacaggggcctgccaccatgcctggctaattttttgtatttttagtagacacggggtttcaccatgttggccaggctggtctcgatctcctgacctcaggtgatccgcccacctgggcctcccaaagagatcggattacaggaatgagctaccacatccggccagaattagtgcatttaaacctcacaaccaccctcagagatgcacaccccacgttaccctggagccagagcctgctcaaagacagagaacagccaggggaaagcagtgggtggagggctggagagaaagatgtgctgcttttagaaatgtgaaaacagagaagcacgaaatttgggaggtgccaggacatgagactgagggagtggggtcgccacctggacagcagcagtgacggcacagcactgcagggggcagtaatgagtcgcccagacggcctgcagggaggagaggcccgttccccaggggagagtgctgcctccccagaagttgtccttgacgggcaagagcccttcatcaagaccctaccctttcctgggagcagtgagcacccagggcctggcacggggacaggaagccccggccctcccatcgccagagatctctccgacggcttcccagctgcacaggccctgctgggtcagcagaagccttgtctccttgctgaagagaaccacatcacccagggtagactgcattcaactgctggtcagtgagggaggagaatggcccggccccctcagaacaacatgggacacgtctgcaggccacggcagtgcagggctccccgtgcagctgaggcctgtgtccatatagcactgaggcccagcttctcccactgtccagtctcgcctccatctcttcccttctacggggctgatcccatgagtacgtcccaatacactctgcacacatcagtctccccagcagacagcacttccccaagaacccagctggcaccacacactgggccagggccaggggtacaaggaggaaggcaggtttggggcagctgagccccaagcgcgtagggaaacaggtcatgactaaaactcaaaaagcagatagcacccaggagcagtgtaagaagagaagatgaaggccaagaaaggagcccgggagaaaggcaaccttgaaacaggggcagaaacaccgcgtggccccatgagagccaacacatgcaaacctcatctttggttctggaaggggggatggagttacccagtgactcgaaggggcacgaggggccctgggttctgttcctgcccgtctctgatctgggtgttgattatagcggtggccacttggtgagaatttactgagccacattcctatgagtcgtgcactcctctatgtaaatgttatgctttgacatttatatttttaaaaaggcaggctaaggaaatgggaggcaacacaggaggctgaaaagaagcctgagaggtggagggaaaagccatggagtgtggcggccgaggagcaggaggagatggcgtgaaggcgggaggaggtggcacaggtgtcccagagaagtgagtgtggaaggagggagccaaggcatggggcagggaccttgtcactgacgaagagctgggcagcatcttccacccactgaaacccaagcccagggtttacatgaaccagcatctaaagtgctctcattcacagttccttgaaaaaaaacattgtggtttgagctcactcaccctgatccgacaagaagtccagcatggtctgtagaaggaaggacaggtgtctgacagagagggcagggttccccatccttcgggaggcgtagaccaattcatggagcaaacgcatctggaccgcagcccagcctctgtgcgtgcctgcgatggaagttacaaaacatcacaaaagtgcttggagagggtacaggaaatacggttaatctaagttgtaaaacttggcaatttgaagacagatgcctcaaccaccaaactccaagagcaacaaaaaatatttcctctgcttttaatgaccctggaaaagtactttaaagttggcatggttttcatacagcaaaaacaggcattacactatagcttctctctctgcaaagacatgatttgatttcaaaaatagcctgcttcgaaataataagcttagaacaaaagatggatttcatatatctgagctagagacatactttttttccaagaaaatactcatatttgaagggccttcattatcaacaaccaacaacattaaatcaaaaatataatatttctctaaaatataagaaaaatgaagaaaagtagatagctaaattagaaaaaaaaaaagttaaattctacagctgctcactccaaaacagtttagcatctttgaattaaagacggagaaatctggatgcacagacagttgaaaagtatctctttttttaagagatgaggtctttctctgtcatccaggctggagtgtggtggtgcaatcacagcttactgcagtctggacctccagggctcaagcaatcaatcctcccatttcagcctcctgcgtagctgggactacagttacacaccgccatgcccaactacttttttttttccagtagagacagggtctccccatgttgcccaggctggtcttgaactcctgacctagaaccatcctcctaccttggcctcccaaagtgctgggattacaggtatgagccactgctcccagccaatctgtgttaacacacacaccctgccaatggctctgataaccaaccacacagactggctaatcactgctccagctgatccaaaacttagaccatgaaaaaacgcataaatgcacattcaaactctgacaaaactgccacgcactgaaagtccgtaatagctcacgacagtcggttggttaacaagtatttactgagaacacaatactgtgcagggcaggttctcgtgccattgacactcttgtgggaagagtcaggcctcagccctgggaaacagcatgctggtggatgctgggacgaacacaaacagtaatagtgagggctgatggggctgagagatgctgcgtcagccagggcaggtgggcaaggaggtgacatctggggtgaaccctcgatgagaagggggccacgccaaactgtaaaacggagacagtagtcggagtacaagttaaagttataaggcttcagtgcaataacccatttaaagcacttcagcagtttatttatcataagttctcaataaatgctagttgctattaatattattattcaatgaatataatgtggttaacacacaggtcaacctttgactctagctgtgacatgattaatgatccaacctgttccactgtttcactaagaatgagtcctccatttttttaaatccctattgagattatttattaagtaaaattacctgcttgtgtgtcaaaatcccccattcaggtatgacttcctgtacctgaagactgtgcgttacttactattgcatccccaggacagggcctgacgtgagactgggcgctcggctgaggctgactggcgagcaaacagaacaagaagggatgcctcctccctaacgcaaatagcaggggcccttccttctatcctaacctttctctgtttgcccattgatatttgaagacgttgctccaagggttccaccgctcacagcccttcctgagctcttccctcagcactctgccctgcacagctgaccagtccctcttctgtatttccgctgtattttgcacaaatttcagcccacaggagttatctggcaggtaccataaggcacctgtaatctcatgtctttgtttctctcatcaatccttaatttccttgggaggcaggtttatgtcttatccattcaagtgtccttaatgcctggcagggtgcctgataacaaagttggtacttaacacacacgtggatcaagacgtaaggctggtgaaaggaaaccctcccatgttgcggacgtgcatacagctatgaaggagtacagtgatgtggtttctaggatctgctttaaatacttcaacaaaaaaaccaataaagtaaaaataaagccaatgtggtcaaattttgataatgatttaatctgggcaatggacacaatattctattctatcctctctaatttgtatatatttaaagtatttctccataacttctcattgaaatccttggagctgaccatacacacacttaaaaaaaaataaaaataaaaataaaaaaaacactactttatatcttagtagtttatcttcccgacatcttttggaatataaaatggtagtacttctcatacaactgcaggaaaggagagaaagacgagtccctgcaatattccacattgtcaaaagaagccaagaccaaatgccaaaatgaagaagagatttttttaaagattatgaagctgaaatcaatgtcatgactaacctagccatgaattcagaaagacccaatttaactaatctcaacactaccatatccagaaggttttctcacataagaattgggcaaatatcactttgctgattcttttaaaaatagataatgatccagttcctaccacgggcgattatgagtaagaccgagtatacattttcttaacagtaaatagtgtacaagtcataatttctatgtggctcaaagtgctctccctataaaatgtgaattatttttctgaaggcagatttgcagcatatgacccagtgataaaattttcaatactcttgtaatcaaaaatttcaccaatttggaggtttattttgtatatgaactattgccttttagcaaatccatctgccttagcagtctctttctttcataagagttcctgggcaaaatttaatccctcgtccaggaaaaggcatgatcaaaaatcttcatatacagcaacacaaataagatttaaatgatactaagcggccccttaagccggcaagtacacacagcacacatcagtgttccttcctcgaccgtctataaccagctagtgcaaatgttcatttcaagaaaaagaatacattttgggacctgagaatacagacaatttgccttttatttacaggtacagggtgttagtagacttccattaaattctctgggagatgtttaaagcagtccagagccacagtggagatggggtttaaagtgacttttgtgttttgttaaacatacagccagctgacatttatcatttttaatctcagccagtcaccttctttctctagcctctttcacaaaataatggaaaatgtctcctcctgacacaaacgtctttttttttttttgaaacggagtttcactcttgttgcccaggctggagtgcaatgccacgatcttggttcactgcaacttatgcctcccaggttcaagcaattctcctgcctcagcctcccgagtagctgggattacaggcacgtaccaccatgcctggctaatttttgaatttttagtagagacggggtttcaccatattggccaggctggtctcgaactcctgacctcaggtgacccacctgcctcagcctcccaaagtgctgggattacaggcgtcagccactgcacccggccccaaacatttttcaaatgtatttacaaatcatgggaagtgttataaggaagaacaacagaattcaaggaaaagagaaaacggcattcgatgaaagagaaaaataaaacagttccacttaaggctgaaaggaccactgaggacctctccgaagaaatggcatccagctgtgacctgaggatgaccgggagtgaggcaggaaggacagggaagagtgtccccgaaggaggcaagaggcatcagaagacctcagactgatgcagtcttaaatgttacagataactggccccgggacaggaaaaaaagaaaatgaagaccactcctaagataacttgcatagagcccaggaggcttgcttttaccctgaagccagcctggagttatattcaaaggatgcaaaaaaaaaaaaaaaaaaaaggaaccgaaaagcaatttaaatcttgcctgaagtctctcaaaagcacagcaaatgggaattccattcacaagtgcacatagaaatctattaaaatacactttcttatcactctacaaagcaatagtgtgattgctttaaaaactttcttcttcctaaacactactccttcccaattaaatttctccagaatccagcctaaatgagcttagacacccaactctcccgtgctaagactctgaggtctaatctctcctcctccaccagtaactcttagcattttttttttcgagacggagtctcgctgtcacccaggctcgagtgcagtggtgcattctcggctcactgcaacccttctacctcccaggttcaagtgattctcctgcctcaacctcctgagtagctaggattacaggcatgcgccactacacctggctaatttgtatttttttagtacagacgggttggccaggctggtctcgaactcctgacctcaagtgatccacccatcttgacctcccaaagtgctgggattacaggcatgagccaccatacctggccactcttagccttttaaaatgtaaatcctacaagttttagggcttgtccagttattttgtccaaaattaactgtgtgactagggcagacccctccctggccctcatctgcaaccaaaggccagggagggcctgccctagcaacacacactctttctgggggagccagggagggacaggccttgcaaaccccattcacgctggcctcaggggatgctatgggaagcatactagacctgaccaaagatctcatttgacaaacagccactaacatttgctgagcactgtccaaagcacctcacaaggactaaccaattcaatccttacaacctctaccagtaaacgagtgtaaactagtggcccacttacagatgagaaagtgggcacacaggactcagggacacggccagcatcccacagctggtcagtaatggcgtcctgtgctcccaccagctgtgcaacctcaggagtaacactgtgccctgcctgccctggtccctcacatggcacgtggaacgcgtggtctccactcaccaggctgtaagaaatgaggttacgcatgtgaagccatttaccatgaggccacagctagccttggcgtggattagaaagagatgccccgtaggcaaacacagcctgcaggcaccaggcttagcaaggcatgcccagaaggtccctacaggagacaacagcgccccttcatctgaatgcacccagctctgagctgcagatggctggcaagcagggcccagcaccccgcacaggctgcaactgcacggcgaccctgcccagcacagcagctgctccaggtatgtcacctaaaataccaagaaacagagaagaaaatgggaacaatcaccttttgtgaacaatcaattttttgtaacatctaataaggacaatttatttcaacttttactttaagttcagggctacaagtgaaggttacactggtaaacgtgtttcataggggtttattgtacagattagtttgtgacccaggtattaagcctagtacccattagttatttttcctgatcctctccctccttctaccctccaccctccaaaaggccccagtgtatgttattcccctctatgtggccatgtgttctcataatttagctcccacttataagtgagaacatgtggtatttggttttctgttcctgcagtagtttggtatgaataatcacctccagctccatccatatccctgtaaagaacatgatctcattttttatggctgcataatattccacagtgtatatgtagcacattttctttatccagtctatcactgatgggcattgaggttgattccatatctttgccattgtgaataatcctgcaatgaacacacctgtccatgtgtctttataatagaatgatttaaagaaatataaatcattctattataaaattttttaataaataaaaatatccctaatctcgaggcttactataaaactatagtactcaagatagtgtggtactggtgaaagaacaaataggttaatggagcaaaagagacagcccagaaatagaatctcctaagtatagtcaactggtctttgacaaagcagcaaaggcaatcaatggagcagagacagtcttttcaataaatggtgctgaaataactggacatccacaagcaaaaaaataactctagacacagacctcacactcttcacaaaaattaactcaaaacagatcataaacccaaatgcaggatgagaaaatacaaacctcccagaagttaacacaagagaaaatctaggtgaccttaggtatactaatgttatatctttagataaaacacccaaggtataacccatcaaagaaagaattgataagctagacttcgttaaaatttaaaacttctgctctgcaaaagacatatcaagagaatgagaaaacaagacacagactgggaagaaatatttgcaaaagacacaactgataaaggactgtcatccaaatcatagaaaaaactcttaaagtcaacagcaatgaaacaaacaacctaattaaaaagggggcaaaagatctgaacagacatttcaccaaagaaggtatccagatggcaaataagcataagaaaaatgctcaacatcatatgtcatcaggaaattgcaaagtaaagcaacgagataccactacacacctattagaatggccaaaatctaacagtgacaaccccaaatgctggcaaggatgtggagcagcaggaactctcattcattgctgaaggggatgcaaaatggttcagccactgtggaagacagtttggcgggttcttacaaaagtaaacatatttttaccatatcatccaggaaccatgccccttgatatttactcaaatgagctgaaaacttatatccacacaaaaacttgcacatgaatgtttatggctgctttacaattgccaaaacttgcaggcaaccaagttgtcaaccaagattcattaggtgaatgtataaataactgtgacatattctgatagtagaatattattcagcactataaagtaatgagctatcaagctgagaaaagatatgaaggaaacttaaatgtatattactaagagaaagaagccaatttgaaaaggctacatattgtatgattccaactatatgacactctggaaaggcaaaactatggagacagtaaaagggtcagtggttgccagaaggtaataaatagggagggagggatgaggagacagagcacaaaggatcttcacggcagggaaacttctctgtatgatatcataatggtggatactcatcactacacatttgtcaaaacccacagaatgtacaccaccaagagtgaaccctaatgtaaactacgaactttgggtgatgatgatgtgtcaacataggttcatcaattgcaacaaatgtaccaccctggtatggggtgttaacagtggggaagtctgtgcgtctgcaagggcaggaggtaagtgggtcatcagcctcaattcacacatcctcatggtccatctaaaggtgtcaatcatgaaataaggggtggggagacaggttccatcctatccctccagggaacaccgaggaaaaagaaattagagaaaggaagggcaggtgaagaaaaactatcataaacctcgtctcagagcacaccttatccatctttgtgtatgacctctccaggtctcctctattctgcaccccgtcatggtttttggggtttctttaaacgtgggacttggcatctggctgtgctggctgtgctgatgactggactcatactgttggtggagttcattttgaagctggatcttatcccttgcttttgtcttagccgttgtgatgatactgagtgcaagaggtcaagagcagagttcaggaccctctccagcaggccttctattccgcagggacgtcttggttcttgctttgtgctggacaccattcacatgttgagggtgaacacacaaagtgccaaactccctgccagatctcagccatctcacctgagtggacagcatgacaggcttttatcacttgcccagagtggtcatcagcgctccgcctgcccctgtggctccagagaggcaggatatcttaggctctaaagacaaaaacccataaaaactggggatttatatggggaacttgatgggacttgggggattttcaaccctgaacacatctgcttcacgcagggccttagctcttcctggcatagcttctggccagaccacagcagtccagagcagaagtgccctccccagactgcaaaagcaccccccaggtctagttctcttccctgaagagaaataagaggctaaagtgctgcgtacactccatcccagcctcccttcactccccttcactgcccgcctgactctcctcctgctatattactcactcagtctgcgttttctcttccaaacccagtgccctccttttaaatgaggcaggaggatcgcttcagcccaagagtttgaggccagcctgggcaacacagcgagacctcatctctaaaaaataaaaataaataaatgatttcaaatatcacagtgttctcagccagggatttcgcaaagtatagctgccatgccaaatctggccaccatgtactaatgtaaacacagttccatggtgtgcgtgccgtccatggctgctttcacaccacaacagcagggtccagtcatttccgcacagaccgtgtggctcataaagcctaaaatatttactatctggccctttacagagaacatttgctgacccctgctcgaagctaaccagaatgcatcctgagaatcggatttgaggttctatcaaatgtaagtgttgcctgggaagatggttgaacagtaagaagtctggggagtgtgacttaggagtgactgtcacagcaaccacagacacgtaagttagaagcaggctctggaaggacctgagagctctgtgcaaacaccgggaagctgtcacatgtgagaggcacctgtttatttccactgtagagggcagaaactgtctcctttgccatcgcatcactcacccaacacactgcatggcatgggggcaggagtataacgaactacctgttgaatcaatgtacaaaaaagtccagtagatgtcttcagatattctagcaggtgaaagtaaggagaaacataatgtttaattcaacgttggggagagccctaactatcagaattatccaaaagcagaacttttggattcatcataaagccatgagcaccttcagtcagcagaggccagtgaaatggatggacatgaccacataaaaaagatactgaagaggccgggcatggtggctcatgcctgtaatcccagcactttgggaggccaaagtgggcggatcacctgaggtcaggagtttgagaccagcctggccaacatggtgaaaccccatctctactaaaaatacaaaaattagctgggcgtggtagcacgtgcctgtaatcccagcttctcaggaggctgaggcaggagaatcacttgaacccaggagttggaggctgcagtgagccaagatcatgccattgcactccagcctgggcaacaagagtgaaactctgtctcaggaaaaaaaataaaaataaaaaggatgccgaagaacccatttttgccctggtgggaaattaacctagatgacatcacagttctttcctgtctagaagcctataccttcactagctctaggcttgaactaaagaaaaagtgtatgtttcctatctaaaagtaacccctcaaaaatgtttttttttttgtttttttgggttttttttagataaggtctttctctgtcgcccaggctggagtgcagtagcacgatcccagctcactgcaacctccacctcccaggttcaagtaattctcttgcctcagcctcctgagtagctgggactacaagcgcacgccaccatgcccagctaatttttgttttttggtagagacagtgtttcaccatgttggccaggctggtcatgaactcctgacctcaagtgatccgcccaccctggtctcccaaagtgctggggattacaggagtgagccaccgtgcctggcccccaaaaatgttttttctccttctaatcagactttgtctaatactgggcattatccttgtacatatttgttattagattgatagctttatttttaatacatattaccctgcattaatatttcagaataagaatttactgctgaatgcatagctcaggtatacacatatacccaaggatatttattctgggttcattgatttgtgctaaactaactaaatctcatgagtaaaattcattaggtacttccactgtttgattgatgatgacacaccatgccaatgaactcaaaggcaatttctgactcccactgataaagattcaagaatccgagccccaaggcaaagcaccagtactttttcctataatcggattacagcaggcacccaactccagggcagggatctagtcattctggagccaccagcaccaaccacgatgtctgccactcagggcaggggctgaaacagcatgtgaccatcagacagaaagcaacaccttagcgccagcaaggggactccagtacctctgctgaaatctttgggatccagcgacagactgtagccgggcagcgtttccaggaggagtttgtagcaggccctccacccaggctccgcgatgcttggggccacgcactgcatggcggccacgcgcttgaagaacgcagacttgcgatggaagccgatcagctcatagagctcggagaggatgctgtagcgctgaattttctcttcctcagaaagctgaagcacagagagaaagtaaaaagcttttgaaagaaacgtataagtgaaaaaagaagcacacattaaaaatgtctcttcataaaacaaagacctgaggagaatcgaggagaatcaaggagagggaaagcctggtgagcagcgcatggcgcaggccccaggtggcttcagaccttccccagccacagctgcaggtgcagcccatcttcctgctgataaagcccagattctctgctacaaaggtacctgctacaaatctgagacctctactttaagttccttcacaaaagaaaagaaaaggaacaagagttcatctacacaacaggattttatcaaggtctctcatcaaacacaaaaattcttaaaacacaagaagacacagaatcatgtaactgggtaatgaattattaacaataccactgatatcagacttaagacttcagggtttacaaaagttttctttcatccaagacccaactgaatcctcccaacaaccctgtagtgtagcaatcataacttctgtttcttttcttttttttttgagacggagtctcactctgtcactcaggctggagtgcagtggtacgatcttggctcactgcaacctccacctcccgggttcaagagattctcctgcctcatcctccagtgtagctgagattacaagcacccacccccatgctggctaatttttgtactttcagtagagacgggatttcaccatgttaaccaggctggtctcgaactcctgacctcaggtgatctgcctgcctcagtctcccaaagtgctgggattacaggtgtgagccaccacgcccagccaacaacttctgtttcttcagcacctactgtatggcagcagacttaacgtacctgatttactcaatacaagcatcctgtgagctggcaaataaggacattaacagctcagggacacattaatcacctgtgcaaaatcacacagccaagaagtatcagggacaagacctgactctgggcctgggccctgcccactgcacagcgccttcagagaagaaggaaggcagagcccactctgctgctccaggagcactgttaaggaagcgcttctctccctcctctgccctggacgatgaatgtttccctgatgtttctgtgagtacagagccttagcttgaacgcccttccaacttgggcctccaaaccctccctccatcccctctcctccgcgctcactgccatggcctcgatggggccctcgtcagccctcatctggaagaggaatcggcattgtcttcctaccacctctcgaccttccttcacctgtccacacacccctgccagacttaggttcctgagacatggctcagagcccatcacccgagccacggtttgaatgtttgtgcctccccaaaattcacatgttgaaagcctagcccccaaggtgatggaattaggaggtggggactttaaaaagtgattgggtcagggggtgaagcactcacaaatggaattagtgcccttataagaagagaccctaaagagctagctcacctgttgcaccatgtgagaacacagagaaaagacggcggtctatgaacaagcaagtgggccctccccagacaccaaacatgctggcacctggatcatggacttctagcctctagaactgtgcacaatacatttctattgtttatcagccacccagtctgtggcattttgtgacagcagcctcaccggactaagacaatccccatcttgaaaccactagaccccttcaggactgtaaaatggagcccaaatgccttcacgggcatgccaggccctcctcagccccaacctgctctggaaattcgaggccccactgcctacctatgacctcaccagactgaacaactttaactcatttgttttctcattctgtcaacacatatttactgaacccctactctggtgccagccactcttgtggcagaggatacagcagtgagcaaaacaagctaagactcctacccctgggggcctccatgctaatgacaggctagtcccctggcttagaatcagtggggaggatgacaataaatcaatgaaaaaataaacaaaatagctgctctaagtccaatgaaatactctttgacatagaatcatgggtggaagcgtatgaggcaggctgtactaggtgacgccgccggggcacacaggctctctgctcctgcaatgcctccacagccacatctggctctccctttggacactcggttccaatgccaccctctccaagaagctggtcctcatgcccttcagcgggaagctgctgcttctttccctaaattctcctaaccatgctggactccataatgtcctttctctgtgtctcccacacaatttacctacatatcggatctctgccagccccacttttcctacagtgaaaggtcatgccgacgccgacgatgtgtgagaatccctgttgctccacctgctcaccagcatatgaggatatcacctgctcaccagcatatgaggatatcacctgctcaccagcatatgaggatatcagtcttttttattttagacgttgtggtggctttaacttccatttccctgaaaactaatgatgttgaacctttttcatatgatcactggccactggtatatcttcctttgtgaagcgcttgttcaaatcttctgacagtttttaaaattagatcgtttgttttattactgagtcgtacgagttctgtatatattctgaatgcaagtccttagttatatgtgttttgcaaatatttcctcccggtctgttgccgatttatttccctaagggagtgttcataagcaaaagcatttctctgtgatgtagctcaatctatcagctttttcttctatggttagtgccttctatgtcctcatctgagaaaaatctttgcccgaggtcacaaagatatcctatgttttcatctagaagttgttgtctaggtctatggtccgtgaatattcaaatttgagtaggacatggcctgtccctttccaggagtgtgcagtacagcagcgaacagaagccccagtgctggaggacagcagccagggacggggtggaagaggactgtaaagaggaggcaggggttggccgggcgcagtggcgcacacctgtaatcccagcactttgggaggccgaggcaggcagatcacctgaggttgggagttcgagaccagcctgaccaacatggagaaaccccgtctctactaaaaaatacaaaattagccaggcgtggtggtgcatacctgtaatcccagctacttgagaggctgaagcagaagaattgcttgaacccaggaggcggaggttgcagtgagccaagattgtgccattacactccagcctgggcaacaagagtgaaactccatgtcaaaaaaaaaaagaaaagaaaagaaaaaaagaaaaagaagaggtgggggtacttaacgccttcatcacaaatctggaaatgcccagaccttcagctgcacccactatgtgccagacatgatcaaagatgttggggcagagaagggggcagagaagacgaatactgatcttagccagtgcctgtaaagaggtcaccatctaaaataaaggtgacagccggggaaggtcacatgccttggccaccaatgcgttagaactcccattgattctttcatggaacctatctaagatgaaaggttgtaaataatactatgatcagtaataatattacttcattcctcttatcatttcagtgtaataagaagtcaaatgataaatactacattgcaaatggaattgacatcactttaaagccctaaaacggttccttaatgggaaaagctcgagcgcaactgcttttgggcactaggcagacaattgactgagaagccatgagcccagagagcctcaggacaaagccatgtttggtcgacacaggcacctatggcacaaggagccggggagtacaaaatggtccctggcaaagctaggccaagatcctcaggaaatcttgaaatgagatgaaatccccaaactcatttccaacctgctgctcttttagggcatattaatcagcacatctttgttctaatctttcaataggctgcacagtcacgaagtccaagttcagggcccagatgtttatgtgaggttccaacgaaagtggctccaagactactcaagacaaggagctttattcacaaggcagactctgagggatccaaatattaactcaccattccatttccaagtagaaagtaagtttagacctgctttattctgttaataagaaataaagtgacaagatcagagggaaactccagacacaggacttgtctctggcaggatggagagggaggaatacagcctggagctgtaaagtcctgagttccagggccacatctgcatatccctaagaaacagggatcatcaaatctaattacgattgtcaaaaagactcaatgaaataatgcaaacactgagcataagcctaaaactctcagtgagtgttcaagaaacagaaatatcactgttagttaatgcctttgacaccacaagttctaaccccaagttaaccagccactgatgctctagaaaatgccttaaccctcatcagccttctcaaacgtgggcacttgcagtgatcagaagaacaagtcagtgacagatgtgtaggggcagcctggtggccgcactcaactaaatgatgaccgtgggagaatgccggatgggaaacagcaggccccacacattcccaggtttgaaaacacactctgctcctctctccggctatttccagccataattacatggagagaaaatacatcttcaaaattatacaaactttccatatatgtctatcaaaaaagtttgttaaaaacataacctactttctcatatcccggagtaggggtatgaggcatgcaccaaggattttcctttataaagcatctgtctaaagtaattggatccattttcagttttaatcattcaaaagtaagaatgaaaacaaagcaaaacaaaacaaaaacttcaataagacctggtccctcaaaacttcatgaagtagtagaggagataggtccataaagaatcacagtgttggaggccgggcgcggtggctcacgcctgtaatcctagcactttgggaggatgaggtgggcagatcacaaggtcaggagatcaggatcatcctggccaacacagtgaaaccccgtctctactaaaaatacaaaaaattagccaggcgtggtggcaggcacctgtagtcccagctacttgggaggctgaggcaggagaatggcgtgaacttgggagacggaacttgcagtgagccgggattgcgccactgcactctagcctgggcacagagcaagactccatctaaaaaaaaaaaaaaaaaaaaaaaaagaatcacagtgttgaggccaggcaacgtggctcatgccgataatctcagcactttgggaggctaaggcaggcagattacctgaggtcaggagttcgagaccagcctggccaacatagtgaaaccccatctcaactaaaaatataaaaattagccgggcgtgatggtgggtgcctatagtcccagctactcaggaggctgaggcaggagaatcacttgaacctgggaggtggaagttagcagtgaaccgagatcgcgccactgcacttcagcacaacaagagcgaggctccatctcaaaaaaaaaaaaaaaaaaatcacagtgttgggaagaagatggatggagagatggctgaaacagggatgctgtgccctatgccttggacagatacctggaaggttcctagactaccaggtatacccaccacatgctagaggaaggacactttgtaaacagtcagtgcccttgttgagtgcaccatccaaaagagatggccaagcaaagtccgcgcttgacccctgatcacctcagttccagcctttgattcattcttggataacctgaaaaacccactcctttggcttcaagaaatactgcctattttaccatctttgggtttagtgagcaagcgagttcatgtgtactttaaagatgatttgaactctgactacagcttttctccacattcatctttccataccagagttctcagtttcttttttttttcttctctttttttgagacagaatttcacccttgtggcccaggctggagcgcagtggcgtaatctcggcttactgcaacctctgcctcccaggttcaaacaattctcccgcctcagcctcctcaggagctgtgattacaggtgcccgacgccacacccggctactttttgtatttttagtagagacagggtttcgtcatgttggccaagctggtctcaaactcctgacctcaggtgatccgcctcagcctcccaaagtgctgggattacaggcatgagccactgcacccagccaagttctgagtttctttaagtctgttctccataaaatctagtccctccaatgacaactcatgcagcctgaaattaaaagccaattaaacaagaccatacacagctaaaacgtcccccaccccccatcactcctttcctaaactcctctcctgcctgtccgaaatagactaatgccttccgcactacactacaaaacactaatgatgtgttgtcagattagatggacacggtggtgcacacctgtaatcccagctacttgggaagctgaggcaggtgaatcgcttgaacccggggggcagaggttgcagtgagccacgatcacgccactgcactccagcatgagtgacagagcaagactgtctcaaaaaaaaaaaatactttgggatacttaaatgagaccttgggagagaggcaaaggcagtgtatttggggtctaacatctcaatccagagcttccgtgaacctttttcatgttttctgttcactgattcattcagaacgtagcttctcactccagaaggacttatgtttttctgccaggagtttgtggtcactcttataccaggacaactttaaactaaaccctctttggattggttttgtttccttctgtaatgcttaatactaagcgtcaacttgatgggactgaaggatgcaaagtattgatcctgggtgtgtctgggagggtgctgccaaaggagattaacatttgactcggtgggctgggagaggcagacccacacttcatctgctgccagcgcagctaagaatataagcaggcagaaaatatgaaaagacgaggctggcctagcctcccagcctacatctttctcccatgctagatgcttccccaactagaacattggactccaagttcttcatttttgagactcggactggctctccttgctcctcagcttgcagacggcctattgtggaaccttgtaatcatgtgagttaatacttaataaactcccctttatatatgtatatatcctatcagttctgtccctctagagaaccctgactaatacaccttccaacaagatcaagtttccttattttcttactttaaggactgaggtattttctatttcattcttttgctaaacgtgtcgtttaggggatcttggctttacacatgggtctgccatccaactcccaagtctgggcaggtctaaggtttattttctatccctcctatgtgagcactgaaaactgttaccacagctaggcagggcattctctggcttccaaggcctactgactttcagaattcctgcttttgggaaaaggatttccttttcctttcttaacaatgagctttgcattttgaaagatgttggggatggggatggggggatttttatctcttaatcagaattttaaggaacttgtgctgagagtttttggaccactatattgtcaaaacaaaaatcactaagtattttccaaacttaagtattatttgaaatttttcttttctttctttttaactattaacagactttttttttttttcattaaaaaacattgctcagtccatggcccagcctggtaactggggccacagggcctgcccggtgctggtttttaccagggcagcctggtgctggtgtccgaggcaggcctggcactcacgttgctctcctttccctagtggaggtcatctccctccatgctgtgctgcctggggccggaggaggctggtgcaaggctgtccttcccatcctcttccatgcaccttttcttatttatgtgcgaccgtgggtgtagctgtggtctcctgcctggtttcctggctcttgtgaaggtgtgtgtgtggatggttgtcaggttggtgtttcttcaggtgggcaagtgcggaaaggtcctattctgccatctggctcacattacaccttccctaagagaattaatatcagccccaaatcttcacagtatacatgacacatttaaggtgaagcaaacatgcaggaaagaaatgctaggataaatcacttgtccccatatattgtttgccttataaaagaattatttattgcaattaaatttgcataaaaagaaaaaaattaagccagcaactagactgaagccttgaagggacatacaaaattaagaaagggatgaagccaaaaaatgagaggacaatctatacgcttaataaaacccctatcctacagatgaaattaccgattcctacaacaccttatctaaatatgacagtaatgtaagatgcctttcttattaggaaacagccaagataaaaaataatcaattaaaacaaaaaattaaattctaagttttgcctgccaactaaatttgtctccttcctggaaaaaaggaagatttactggttctttattgtaggtatctcgtgttcatggattggaagacaatattgctaagatggtaaaacacctccaatggatctacagactcaatgcgatccctatcaaaatcccagctgacttatttggagaaattgacaagcttatgccaaaattcacatagaagtacaaggaacccagaatagccagaaccatcttcaaaaagaacgaagttggaggagacacacttcccagcttcaaaatttactacaaagctataataaccaagatagtgtggtactggcataagtaccacataagatcaatggaatagaaaaaaaattatgatcaactaattttccacaagagtgccaatggggaaagaattgtctttacaacaaatgctgcttggacaactggatattcatatgcaaacaaataaagttagccctggcatggcggctcacggctgtaatcccagcgctttgggaggccggggtgggtggatcgcctgaggtcaggagttcaagaccagcctggccaacacagtgaaaccctgtctctactaaacatagaaaaaattagccaggccttgtggcaggtgcctgtaatcccaactactcaggagactgaggcaggagaatcacttgaacccgggaggcgggggctacagtgagccaagatcgtgccactgtactccagcctgggtgacaaagagagactctgtctcaaaaaaaaaaaaaaaaaaaaaaaaagaataaattggaccccctaactcacatgatgaacaaaaattaactcaaaatgggtcacagacctaaatgcaaaaactaaccctataaagttcctaaaagaaaacaagaaatcttaatgacctcgggttagcaatcttttaaatatataacaccaaaaacacgtgaagaaaaaataaataaattagacttcaccaaaattaaaaacttttgtgctgccaaggacaccatcaagaaagtgaaatgggccgggcatggtggttcatgcctgtaatcttagcaacctgggaggccgaggcaggtggatcacttgaggcgaggagttcaataccagcctggccaacattatgaaaccctgtctttactaaaaatacaaaaattagccatgtgtggtggtgtatgcctgtaatcccagctacttgggaggctgaggcaggagaattgcttgaacccgggaggcggaggttgcagtgagctgagactgtgccactgcactcaagcttgggcaacagagccaaactccatctcaaaaaaaaaaaaaaaagaagaagaaaagaaaaagaaagaaagtgaaatgacaataacaaaatgggagagaaattctgcaaagcatggatctggtaagggactagtatccagaatatataatgaactcttacagctaaataacaaaaagaaagtaaaccccaatttaaaacttgacaaagaggaccaggcgcagtggctcgcgcctgtaattccagcactttgggaggccaaggtgggcggatcatgaggtcaggagatcgagtccatcttggccaacatggtgaaaccccatctctattaaaagtgcaaaaaaattagctgggtgtggtggcatgcgcctgtagtcccagctactcaggaggctgaggcaggagaatcacttgaacccaggaggcggaggctgcagtgagtcgagattgtgccactgcactccagcctggacaacagagtgagactctgtctcaaaaaaaaaaaaaaaaaaaaaaaagcacatgggaaaaatgctcaacagcatcagccatgagggaaatgtaaatcaaaaccaaaatgagacatcacttcacacccactagaatggctctcatcaaaagatggacaataacaagtgttaatgaggatatagagaaactggaaccttcagacattgctggtagaaatgtaaaatggtgcagctgctttggaaaagtttcacagttcctcaaaaagttaaacccagcaatttcactgctaagtatatacccaagagaactgaaaatatgtgttcccacaaacacttgtacattcccacaaaactttgttcccacaaaatacatgtacatgagtgttcattgcagcattattcttaatacccaaagggtggaaacaacctaaagtccatcaaccaatgcatggataaataaaacatggtatctccatatagcggatactaagtggccataagaaggaatgaagtggcggttccaagatggccgaataggaacagctccagtctacagctcccagcgtgagcgacacagaagatgagtgatttctgcatttccaactgaggtaccgggttcatttcactggggcttgttggacagtgggtgcaggacagtgggtgcagtgcatcgagcatgggccgaagcaggatgaggcatcgcctcacccaggaagcgcaaagggtcagggaattccctttcctagccaagcaaagctgtgacagatgacacctggaaaatcgggtcactcccaccctaacactgtgcttttccaatggtcttagcaaacggcacaccaggagattatatcccgcgcatggctgggagggtcccacgcccggctgggagggtcccacgcccacggagcctcgctcattgctagcacagcagtctgagatcaaactgcaaggtggcagtgaggctggggggaggcacccaccattgctgaggcttcagtaggtaaacaaagtggccgggaagcttgaactgggtggagcccaacacagctcaaggaggcctgcctgcctctgtagactccacctctggggacagggcatagccaaacaaaaggcagcagaaacctctgcagacttaaatgtccctgtctgatagctttgaagagagtagtggttctcccagcacggagtttgagatctgagaacggacagactacctcctcaagtgggtccctgacccccaagtagcctaacttggggggaggcaccccccagtaggaacagactgacacctcacatggccgggtagccctctaagacgaaacttccagaggaacgatcaggcagcaacatttgctgttcagcaatattagctgttctgcagcctccgctgctgatacccaggcaaacagggtctagagtggacctccagcaaactccaacagacctgcagctgagggtcctgactgttagaaggaaaactaacaaacagaaaggacatccacatcaaaaccccatctgtatatcaccatcatcaaagaccaaaggtagaaaaaaccacaaagatggggaaaaaacagagcagaaaaactgaaaattctaaaaatcggagcacctctcctcctccaaaggaacacagctcctcaccagcaacggagcaaagctagacagagaatgactttgatgagttgagagaagaaggcttcagatgaccaaacttctccaagctaaaggaggaagttcgaacccattgcaaagaacttaaacaccttgaaaaaagattagacaaatggctaactagaataaccagtgtagaaaagtccttaaatgacctgatggagctgaaaacgatggcacgagaactacgtgacgaatgcacatgcttcagtagccgattcgatcaactggaagaaagggtatcagtgattgaagatcaaatgaatgaaatgaagggagaagagaagtttagagaaaaaagaataaaaagaaatgaacaaagcctccaagaaatacgggactatgtgaacagaccaaatcaacgtttgattggtgtacctgaaagtgacagggagaatggaaccaagttggaaaacactctgcaggatattatccacaagaacttccccaacctagcaaagcaggccaacattcaaattcacgaaatacagagaacaccacaaagatactcctcaagaagagcaactccaagacacataattgtcagattcaccaaagttgaaatgaaggaaaaaatgttaagggcagccagagagaaaggtcgggttaccctcaaagggaaacccatcagactaacagcggatctctcggcagaaactctacaagccagaagagagtaggggccaatattcaacatgcttaaagaaaagaagtttcaacccagaatttcatatccagccaaactaagcttcataagtgaaggagaaataaaatcctttacagacaagcaaatgctgagattttgtcaccaccaggcctgccctacaagagctcctgaaggaagcactaaacatggaaaggaacaaccagtaacagtcactgcaaaaacatgccaaattgtaaagaccaccgagactaggaagaaactgcatcaattaacgagcaaaataaccagctaacatcataatgacagtatcaaattccacataacaatattaaccttaaatgtaaatgggctaaatgctccaattaaaagacacagactggcaaattggataaagagtcaagacccatcagtgtgctgtattcaggaaacccatctcacatgcagagacacacataggctcaaaataaagggatggaggaggatctaccaaggaaatggaaaacaaaaaaaggcaggggttgcaatcctagtctctgataaaacagactttaaaccaacaaagatcaaaagagacaaagaaggccattacataatggcataatggtaaaggtatcaattcaacaagaagagctaactatcctaaatatacatgcacccaatacaggagcatccagattcataaagcaagtcttcagagacctacaaagagacttagactcccacacagtaataatgggagactttaacaccccactgtcaacattagacagatcaacgagacagaaagttaacaaggataaccaggaattgaactcagctctgcaccaagcagacctaatagacatctacagaactctccaccccaaatcaacagaatatacattcttctcagcaccacatcgcacttattccaaaattgaccacatggttggaaataaagcactcctcagcaaaggtaaaagaacagaaattataacaaactgtctctcagaccacagtgcaatcaaactagaactcaggattaagaaactcactcaaaaccactcaactacatggaaactgaacaacctgctcctgaatgactactgggtacataacgaaatgaaggcggaaataaagatgttctttgaaaccaatgagaacaaagacacaacataccagaatctctgggacacattcaaagcagtgtgtagagggaaatttatagcactaaatgtccacaagagaaagcaggaaagatctaaaattgacaccctaacatcgtaattaaaagaactagagaagcaagagcaaacacattcaaaagctagcagaaagcaagaaataactaagatcagagcagaactgaaggagatagagacacaaaaaacctttaaaaatcaatgaatccaggagctggttttttgaaaagatcaacaaaattgatagaccactagcaagactaataagaagaaaagagagaagaatcaaatagacgaaataaaaaatgacaaaggggatatcaccaccaatcccacagaaatacaaactaccatcagagaatactataaacacctctatgcaaataaactagaaaatctagaagaaatggataaattcctggacacatacaccctcccaagactaaaccagtaaaaagttgaatctctgaatagaccaataacaggagctgaaattgaagcaataattaatagcttaccaaccaaaaaaagtccaggaccagacggattcacagccgaattctaccagaggtataaggaggagctggtaccattccttctgaaactattccaatcaatagaaaaagagggaatcctccctaactcattttatgaggccagcatcatcctgataccatagcctggcagagacacaacaaaaaaagagaattttagaccaatatccctgatgaacatcaatgcaaaaatcctcaataaaatactggcaaaccgaatccagcagcacatcaaaaagcttagccaccatgatcaagtgggcttcatccctgggatgcaaggctggttcaatatatgcaaatcaataaatgtaatccagcatataaacagaaccaaagacaaaaactacctgattatctcaatagatgccgaaaaggcctttgacaaaattcaacagcccttcatgctaagaactctcaataaattaggtattgatgggatgtatctcaaaataataagagctatttatgacaaacccacagccaacatcatactgaatgggcaaaaactggaagcattccctttgaaaactggcacaagacagggatgccttctctcaccactcctattcaacatagttggaagttctggccagggcaaacgggcaggagaaagaaataaagggtatttaattaggaaaagaggaagtcaaattgtccctgtttgcagatgacatgattgtgtatctagaaaacctcattgtctcagcccaaaatctccttaagctgataagcaacttcagcaaagtctcaggatagaaaatcaatgtgcaaaaatcacaagcattcctatacaccaataacagacaaacagagagccaaatcatgagtgaactcccattcacaattgcttcaaagagaataaaatacctaggaatccaacttacaagggatgtgaaggacctcttcaaggagaactacaaaccactgctcaaggaaataaaagaggatacaaacaaatggaagaacattccatgttcacagataggaagaatcaatatcgtgaaaatggccatactgcccaaggtaatttatagattcaatgccatccccatcaagctaccaatgactttcttcacagaattggaaaaaactactctaaagttcatatggaaccaaaaaagagcctgcattgccaagtcagtcgtaagccaaaagaacaaagctggaggcatcacgctacctgacttcaaactatactacaaggctacagtaaccaaaacagcatggtactggtaccaaaacagagatatagaccaatggaacagaacagagccctcagaaataataccacacatctacaaccatctgattttttacaaacctgacaaaaacaagaaatggggaaaggattccctatttaacaaatggtgctgggaaaactggccagccatatttagaaagctgaaactggatcctttccttacaccttatacaaaaattaattcaagatggattaaagacttaaatgttaagtctttaatgtttttaactaaactttaagctaagtctttaactaaactttaatgttaagttaaaaccataaaaaccctagaagaaaacctaggcaataccattcaggacataggcacgggcaaggacttcatgtctaaaataccaaaagcaatggcaacaaaagccaaaattgacaaatgggatctaattaaactgaagagcttctacacagcaaaagaaactaccatcagagtgaacaggcaacctacagaataggagaaaatttttgcaatctactcatctgacaaagggctaatatccagaatctacaatgaactcaaacaaatttacaagaaaaaaacaaacaaccccatcaacaagtgggcgaaggatatgaacagacacttctcaaaagaagacatttatgcagccaacagacacatgaaaaaatgctcatcatcactggccatcagagaaatgcaaatcaaaaccacaatgagataccatctcacaccattcagaatggtgatcattaaaaagtcaggaaacaacaggtgctggagaggacgtggagaataggaacacttttacactgttggtgggactgtaaactagttcaaccattgtggaagacagtgtggtgattcctcagggatctagaactagaaataccatttgacccagccataccactactgggtatataccgaaaggattataagtcatgctgctataaagacaaatgcacacgtatgtttattgcagcactattcacaacagcagagactcggaaccaacccaaatgtccaacaatgatagactggattaagaaatgtagcacatgtacaccatggaatactatgcagccataaaaaaggatgagttcatgtcctttgtagggacatggatgaagctggaaaccatcattctcagcaaactatcgcaaggacaaaaaaacaaacaccgcatgttctcactcataggtgggaactgaacaatgagaacacttggacacaggaaggggaacatcacacaccggggcctgttgtggggtggggaggggggaggtgggagggatagcattaggagacatacctaatgtaaatgacaagttaatgggtgcagcacaccaacatggcacatgtatacatacgtaacaaacctgcacgttgtgcacatgtaccctagaacttacagtaaaaaaaaaaaaaaagaaggaatgaagggggccgagtgcggtggcttacacctgtaatcccagcactttgggaggccaaggcgggcggatcacctgaagttgggagtttgagaccagcctgaccaacatggagaaaccccatctctattaaaaatacaaaattagtcgggcgtggtggcacatgcctgtaatcccagctactcaggaggctgaggcagaagaatcgcttgaacccaggaggcagaggctgtggtgagctgagatcacaccattgcactcaacctgggtgacagagcaagactccatctcaaaaaaaaatacaaaaattagttgggcgtggtggtgcatgcctgtaatcccagctacttgggaggctgaggtggaagaattgcttgaacctgggaggcggaggttgcagtgagcagagatggcgccattgcacactccagcctgaacagcagagtgagactccatcaaaaaaaaaaaaaaaaaggaatgaaggactgattcgtgctacaacatggatgaaccatgaaaacatgacgctaagtgagtaatctagacacagaaggacaaacactgtcttttttttttttttttttttgatggagttttgctcttgtcacccaggctggagtgcaatggcgcgatctcagctcactgcaacctccgcctcccaggttcaagcgattctcctgcctcagcctcccaagtagctgggattacaggcatgcgctactatgcctggttaattttgtatttttagtagagacggggtttctacatgttggtcaggctggtctcaaacttccgacctcaggtgatctgcctgcctcagcctcccaaagtgctgggactacaggcgtgagccaccgtgcctggcactgtccttttaggtaaagggcatataagtgttcattgaactactcctgcagcttttctgaaggtttgaagtctttccaggtaaaaataaagtatattatacattacaaatataaaacaataaaagcaatccctcatagggggggttatggattaagtgcagacacaggtgtgcacacccaccaatggtcactgccgtcacggccactcaggcgagtggtgctgatgctggcgagtgccacaggatggaacatgagtcatagctgactccacttcatgcatccaacaaacattaaaaagtgcctggtctatgacaagtattgtgcttagcacagtggctaaaaaaatgaataagatacagtccccagtctagaatctgcatgcattaccaaactttcctattaaaaatgtatcactttaatattcagctcagctctaaggtaacccctaaggtaaagagcttagaatttctaaaagcaataagtgtctgtaatatgctccgtttatgcatttatttacattctgcctcattgtaaaaaaggatctaaaatcaattttttaaacacatacaatttaacaacaataaccaaaaaaaaaaaaaaaagataaaaatcagtgtaaaaagaaaatgagaattctagttaaaggaaaccaggggaaggttaaatcacaaaaatgtctgccatgaagtagatgtaattattaagggtaagctagagactcagctctaaggctcctaacagctaaagcaaaacgataaagatgaaggccaggcgtggtggctcatgcctgtaatcccagcactttgggaggccgaggcaggtggatcatttgaagtcaggagttcaagaccagcctggccaacatgatgaaaccccatctgtactaaaaatacaaaaattagccgggcagtagtggcgggtgccagtaaccccagctacttgtgaggctgaggcaggagaatcgcttaagcctgggaggcagaggttgcagtgagaggagatccggccactgcactccagtctagggaagaaagtgagaccctgtctctaaataaataaataaataaaaagagataaatatcaactcccacgaaataagtatctgcaccaactgcaggcatgtccccaggcaggaagctgtgaagcaccattctcatcctggagcatcattctcaatgccttcctgggttaaacagaacaacccacagcacggatatggggctcattctccaggctctggcttttcctttattttagtcctctccctctttcctcactttattgggcttcaaatggagatctgaaactccagcctaaggactgggtcaaagattcccaccgctttgcaggcagctgccatcatccacagcccagcggggcatcagaggcccacctggcttgctcatatctctgcagctttgactgctcactcaagagagatttccttatatgcctcttactctctcctaaagacaaggtgcaatataccagactcttgttcatgcagaaatgtctcagttccctctctctccttttacatctctaataaggaacttactttcctccttccccatccaacagtttctttgtgagaactatgaaatcctcacaaacaatctctgaaagccacgcaccctgctggctggactgaactgtttcagccatagctaagctgcattcctactactttcccccttctatcttaaaaagcctttcccaaatctccccgtgcctctgattttcagcttaaattgacataaagtttgaggttgcaattattatgtgcatatctagcaggcttttcctgggtttccttagcaacagcttcattaaggaactgcatcaaaaattttaaagaggctattcttacatctgaacagagtagcctgcataaaatttgaatggttttgaagagaaaattaaccaggaacaaagaggtggcaggtcttagtcagcagtatcataagccaaaatgttttcaaatggctcggaatcattcctgaatatttggtttgtgggaggcaaagggtgttggattcaatgagagttgatcctagagtatgttctctaatctggtaaagtcagattattttctagtttttcaaacaattccttactaccactttctcttactgtcacttgccatttttgactaattaagagttaagaaagtgagccgggtgcagtggctcacgcctgtaatcccagcactttggaaggccaaggcaggtggatcacctaaggtcgggagttcgagaccagcctgaccaacatggagaaaccctgtccccactaaaaatacaaaattagccgggtgtggtggcacatgcctgtaatctcagctactcaggaggctgaggcaggagaatcgcttgaacccaggaggcagaggttgtggtgagccgagatcgtgccattgcactctagcctgggcaacaacagcgaaactctgtctcaaaaaaaaaaaaaaaaaagaattaagaaagtgagcagggcatggtggctcacgcctgtaatcccagcactttgggaggccaaggcaggtggatcacctgaggtcaggagtttgagaccagcctggccaacatggtgaaaccccatctctaccaaaaatacaaaaattagccgggtgtggtgcgggcacctgtaatcccagctactcgggagggtgaggcaggagaattgcttgaacccaagaggcagaagttgcagtgagctgagatcgcgccactgcactccaacctgggctacaagagtgaaactccgtctcaaaaaaaaaaaaagaattaagaaagtgaatttcaatcatttgggtagtttgagggaaactacctgatgtggtacatagagcttggattttagaacccaaatggtttaaataccaatggtggtatctacaagacaatcctggagacacggcaaactcctctcctcaatttctcatccttaaaatggagcgtaataaactactttgcaaagttgttgtgatgattatggccaatatctgaaaagcatctagctaaatgcatgcaacaagctggctgcttaatcactcatattatcaatgagtttcagcttatccgataatggagaggttctgccttttcatcttttttgtgtgccaacagagcttattttacaggattaatactgctagagcaggcctgactagaaaattccccaggtctacaaggcagaacatgttcttttccttggatcaaattcacaattatctatgtttatgtttatctgctcagtacccatttccccctgtagacctgaagctcagtcagcatgagaccacgtctgttttgctgcccgctgaacgctcaaggctagcagacgacggacacagcgccgagtgcctggcctttggtgtggaacaagtgagtgagggcaggaaagagagaaccagcacgcctcccagaggcccttcgcctctgaaattatggtctggctttggacaagttgtacaacctttccttagcctgaggttcctcctctacaaacaagaatatctgtactggaaacacagaattataaggattaaagaaaataaccaaattcacaagcctgtaaactgtctgttaatgggtcctcaacaaacaggagctgcctgcatccctttgatacaaccagtgagccgtgaggcagacatgtttgctgaatgctttctaaaagccaagcacagtgcttagcactttatatgcattattctatcattcacaacttacagcaactctagaaagaagtgaatattatcattcccattttatttttattttattttattttattttattttattttattttattttattttatttttttagatggagttttgctcttgtcacccaggctggagtgcagtggcgccatctcggcgcactgcaacctccacctcctgggttcaagcgattctcctccctcagcctcccgagtagctggtattacaggtgccccccaccacacccagctatcattcccattttatagacttggaaacaggctaatgaggttacataactattccaggtcgcacagtgaggaaatggcaacttcaacctaaatctggggggccaaagtccatgcttcttccacctcacctctacttcactatttgcttgtaaaaatccacatgtccaacccataaatgtacaggtagacagctattaaatgaggtatttgctgccatttgtgaattatcttagatagataattatcataaaccattcacctaaacaactaaagaaaagacaggtcaatccatatccctgcacacaaagagaaggaactcagcagtgaattccgtaaaacgaaaaaaccctttccaataccactaaatccagatgtattatttatcagtttttgtatttgcacagggattcttaaagcagaaggaacctgcaataatcatatctcagttcctttcaaaatttccatattagccaaagtcatttccaggaatagatacaactcatcaattctacaatggaacatacttgatcaagaaccaaaagcttgttctatttcagaaaaactacagacccctcttctttattgttcttataaaatcccaccagaactcattatcttgctgcctgctcatctggcaaacaaacatggagatgagtcaactcaagccaagcgtcgtgctggggaaaactcacagggccacggaaccacatctgcactgtccccgcccgcccagcatgggagcgctgttcccctttcgccgtgtctttgctgacctctagtggtccacaggaagaaagagcaaacagcaaaaggacaggctgctccaaagaacaaaatgtcctcacattttaagtgaaaacattttattttatgaaatgtgtgtttctatacccaccagtgaaaagagattccctgcatgcccaattgagcagcattaacttgcaaaggcaactccagttgttaacggcaagccagtctcaaagccctgcccccagctcccaaccaaattgtctgcaattccactgcttcaggctttcggagggtccgtttaaaagcacagtccaccctccactgtcacaaaagatgtctctttacaccctccaatctgatcataacacttgcccatcgcagagtcactttatggggcaggcatcaagacagtactggacaggaggtgtcaaggccagtccttccagtgaccacatgaacttgttatcctgtcattttacagaccatactattaagaggcagagacacagagtgattgtgctcaaggttatgcagcgaacaggtggcaacacaggggtgtgaacctgagcccatctgacagcgcgactccactgcgactcccagcttagattccttcagggattctctcttgcccacctgatgacttttatgcaagacctgtgacaggaactgacctcagcctgcgttggggcctctcttccccacactgtccctcacaaacaaaactgctatgatccccaagtgacttctgtgctcagagctcacacccagccacatgtttacacccagtctctctgctcagaggctcctcagcaccactctgccgggtacttttcactctcctcagagaacacctcctccgggaagccctccaccctcagcacttagagcatcaggctccggggcagggaccacatcctcattggccctgcaaatctgtggcccggcgcagtgctgaaccccacgtaggtcccccaaaaagcatgtcaaatgagaagtatgatccagctgttggttcatttgcccggcatcactggggagaacacctccccttgggcgcccaggtaactgaagcttccactttgaagtgtcaggttcccgcttctgaccatctttaccagaaacttcaacataaactgcaagatacggacctcttcctaatgctcttctgatgacacactgccccagcggtggtgctgtttccctcatactacgtggcctacagctttgagggactgtggtgttgtttgtttttactcggtttatgggctttactctgttctggtcgctccctttggtgtgacactgacacttgccactttgacttatcggcctccctaccaacgtctaatctaggaaattagccaagatgacgggtccaaggggcagtaaatacactttacagaagagggaactgaggcacacagaggttaaacatctcgtcaagggaagtgaagctggaatgccaacccgagcagtctgtatccagtctgtgtgctcaactctcatgctaaagcgcctctctttttatagactatggctataaacattataaagtaccaaaatatggaccaactctgagatggtggtgactgttattttgtttctacttaggttatctgctttcaattgaaaaaattaagaatctctgtagtcaatgcggcaacatttcaacatattaaatctggatgataagcatgagtgtcttattattagtcatacttctttgtgtgttcaaaagagaaactgatttgaaagtctctctcctctctcctccaccccctgccctgtctctcgcctgagcccccagacccacacctctctcgttatgtgagaagctgaacctctcctctttccctccaccactgccttgcagcttgccctcctcggagcccggcctgaccatcgggcacctaacagagcaacactccattccacccgacccacagccggccgctgaccctttccacgtagactcccaagcacgtttccagcgggctggccttcctgccaacagccccagtcctttggggaagctgtcagcactgctcgcctgggctccccaagggcctctgcaatgggccccctcccttcctctccctccactccatacaaatctggtcacatcagtccctgatgttaagaccttgccttttttttttttttttttttgagacaagagtctcactctgtcacccagacaggagtgcagtggtgtgatcttggctcactgcaagctctgcctcccaggttcacgccattctcctgcctcagcctcctgagtagctgggactacaagcacccgccaccacgcctggctaattttttgtattttcagtagagatggggtttcaccatgttatccaggatggtctcgatctcctgacctcgtgatctgcccgcctcagcctcccaaagtgctgggattacaggcgtgagccactgcgcctggccaagaccttgcttttaaaacccgccgctcttagaagcagccccaaatgcttcacctggccgagaaagccctcccgctcagactctgtcctccctacccctctcttcctctccctccctccctctcctcccctacctctccatctccccatctttctacccccaccgccatctctgactttatttggtctctcccagtgatgtgttctgtttctgggcatcactcatgctgagccattttcttcctgaatgaccttctcccatctcttctttacctggctatctcctattcatccttcaaggcccagttccaatctcactgacttagagactgtccctggcccccacaccctccacctccattaaactaagttaaatccttttgccacttcctcccttggcacctgtacctccaatttttttccacttacccactgctcaatgtctgcctttcccacaaaactgtcagatggatgaggacaggacccacctgcctcagctctctttcccccacccttagcacaacgccctcctaagtatctgctgaattacagtgacctacgttctcatactcgtctggtgtccttaagcaaattgtttaacttggtctcagtttccctatctataaagatccaagttaaactaactaaatatctaaaatccttctaagactatcaattttaggatttagcattatcaatccacaactaaaggttttaatgattgttttattaaaaatccatttagattcagattaaagtattatttgctgggttaccactgtgtcaaaggagctatataagtgctttcacaaactgcatgttttataaacccaacaccccaaacagggttacaaatggcaagtacttcatgagtgacaatatcaagacaagaggcgtaaagcttgttgaaggttgccaagctggtaaaacacagttacttctccaaaaaacaaacaaaaaaaatgcaaaggacagcaagttctgaattttgaaagttaaataccacaatgaaagaagtaaaatatacaaataaccatgttaattagaaatcaagttaagattcaacagtttttatcatggcatgctgaacctcagcaaaacgaaataagctgaattcatagtgaatcaattccgtaagaactggatgaactcttccacttacaggtagacatacactcacctgtcgaaggttaatgtaaactgcattctgaagaaattctgatgcttccatgctccgtttctgaattgcaaggacacgtacagccttgatgcacgcttccaactcaatcactcccgcattcttatactgcagggtgtaaaggaaatgcctcagtcaaaaaagagttcagatgtttctgtcacattctaaaggctgtgctactgggactcaataactacaacagcacttcccccatcacagggctccagatacccctcctgatatggtttggttctgtgtccccacccaaatctcatcttgaattgtactcccataattcccacattgtaggagggacctggtgggagatcactgaatcatgggggtggtttcccccatattgttctcatgatagtgaataagtctcataagatctgatggttttatcaggggtttctgcttttgcatttcctcattctctctttgcctgctgtcatccatgtaagacctgacttgctcctccttgccttctgccatgattgtgaggcttccccagccacacagaactgtaagtccagttaaacctctttcttttgtaaattgcccagtctcaggtatgtctttatcagcagcatgaaaacagactaatacagtaaattggtacccagaatggagtgttgctgaaaaaatacctgaaaatgtggaagcgactttggaactgggtaacagacagaggttggaacagtttggagggctcagaagaagacaggaaaatgtgggaaagtttggaacttcctagaggcttgtcgaatggctttgaccaaaatgctgataatgatatggacaatgaaatgaacaatgatatggacaacgaaagagggctgaggtggtctcggatggagatctcagttcttgttgggaactggagcaaaggtgactcttgttacgttttagcaaagaaactggtggcattttgcccctgccctggagatttgtggaactctgaacttgagagagatgatttaggatatctggcagaagaaatttctaagcagcaaagcattcaagagatatcttgggtgctgttaaaagcattcagttttaaaagggaaacagcataaaagtttgaaaaatttgcagcctgacaatgagatagaaaagaaaatcagattttcttaggagaaattcaagccaactgtggtaatttgcataagtaagaggcagccaaatgttaatccccaagacaatggggaaaatgtcagaggtcttcacagcagtccctcccatcacaggcctggaggcctaggaggaaaaagtggtttcgtgggccgggcccagggtcaccatgctgtgtacagcctagcgacttggtgcctgtgtcccagccactccagccaaggctgaaaggagccaacatacagctcgggccatggcttcagagggtgcaagccccaagccttggcagcttccatgtggtgttgagtgtgtgggtgcaccgaagtcaataactgaagtttgggaagtttccgcctagatttcaggagatgtatggaaacagctggatgcccaggcagaagtttgcttcaggagtggggctctcatggagaacctctgctagggcagtgcaaaagggaaatatggggttggagcccccacacagagtccctactggggcactgcctagtggagctgtgagaagaaagccaccatcctgcagaccccagaatggcagatccactgacagcttgcactgtgcacttagaaaagccacagacactcaatgccagcccatgaaagcagccaggacaggggctgtaccctgcaaagccacaggggcagggttgcccaagaccatgggaacccacctcttgcatcagcatgacctggatacgagacatggaatcaaaggagatcattttagagctttaagatttgactgcccctctgggtttcggacttacatgggccctgtaacccctttgttttgccaatttctcccatttggaatggttgtatttacccaatgtgtatacccccattgtatctaggaaataagcagctgcttttgattttataggctcataggcagaagggacttgccttgtctcagatgagactttgaagtgtggacttctgagtcactgctgaaatgagttaaaactttggggaactgctgggaaggcatgattggttttgaaatgtgaggacatgagatttgaggggccaggggtggaatgacaataatctgactctgtgtccccacccaaatctcatcttaaattgtactcccacaattcccacatgttgtgggagggatccagtgggagataattgaattgtggaggtggtttcccccatactgttcttgtggtagtgaataagtctcatgagatctgtgtttttatcaggagcttccgctttggagtcctctcctcattctctctttgcctgctgccatccatgtaagacgggacttactcctccttgccttccaccatgattgtgaggcttccccagccacacagaactgtaagtccaattaaacctctttcttttgtaaattgccagtctccagtacgtctttatcagcagcatgaaaatggactaatacacctccccaccaaagccagagaatttgtttgtgagaaagtctatcctttatggaagcaaaagcgattggtgtggctgagtgagtctatgaatgccacataaatgtgtatgcattcattaaaataatatgaccacagtagcttgctattttgcaaaatttcaaaatattatcaatggatgctttgctatccatttctgcttatcatcccttgtagtactctcaaacatttttagaaactctcacacctgcggctgtaatgcagttgttgtaaattcattttacttggttgcaaaacatccggctccctgtgtgctcaatgctttctgactttgtctcagagttgcttgttcctacttctcagttcctattatggttcctgagatgaagaacaaatgagggcgtttggaacagaaaagccttcgtggaatttcattcaactatgcaataaactggggagtatctcttaagcttcatccccagttctcctagcttcaagccaggagagccatccccaccccctcttacacaccatgtggctccagacccgggagcagggaaaggaggaaggattcaggttccagaacccttccaaaaaagaagagttcagatggatggatctccttccttccctccaatgcccttctccctcccaagcctccactgcaaaatcctccatgctagccattctgcatttttgttttctactccaaaccttatttttattttttttcctagttatcccaactggactgattttcaactgatgttgcataatttaaaattaaagaaagggtttatagaggttgtccatgtatactagtacctgaagagaaacagaggttgggaggaaaaacacactaatattcttttgctggggcattaggtcatgtgaaaaccaatgcatataatcgacaagcctttgctgagacccactagtggcctggtgtggcatcactgctaatgaacatgcagtctatttaccaatcatgaagaagcaaaggcgcaactggttatctttctcactaaaatcatgtacaaggtgggacaagcagttttataattactatgtcagaaagggtaggcttcattcctccccttttccacacatataatgtacatgtaatctgttatattaaatataagttatcacagacgatcagaaaaaggagctacttatacctgcttaaataccaacaatgaagtcagaaatctatcaattgtatatactgtttcatgacacaagaaaaaactaacacagggacttgattctatggaaatgccatttttccttcaaatctcttaaaacagtttctattgacgtgagaataaaagtcatcacaaatttttcccacatatttttggttaaatttacatattttaatgtatattacaaagagatttaaaatgaaatcatgaaaaattatttttttttgagacagagtcttgctctgttgcccaggctggagtgcagttgcttgatcacagctcatcgtagcctcaatctcccaggctcaggtgatcctcccacttcagcctcactggtacctgagacagcaggtgtgcaccaccacacccggctaatttttttgtatattttgtagaggcggggttttgccatgttacccaggctggtctggaactcctgagctcaagtgatcctcccacctcagcctcccaaagtgctggaattacaggcatgagccattgcactcaacctctttttttttttttttaattaattctttcctaccatccaaattttcatggccagtatgattaatatattattcctcaaaaattctaaaataatttgttcaagttaaaaaaaaacagactggagttttgatggggctttcaatatgttttattctgggaggttatgtgtagtggcttaggcctgtaatcgcagcgtctcaggaggccatggtgggaggattgcttcaggccaggagttccagacaagcctgggcaacatggacagaccctgtcattacaaataaaaaataaaaaattagccaggtgcggtgggatgcacctgtagttacagctacttggtcatctgagtgaggccaagtgaggtaggaggatgagggtgggaggattggttgagtgaaggattttgaggttacagtgagctgtgatcatgctactgcactccagactgggcaacagagcaagaccctgtctcaaaaaaaaaaaaatgggtgggtgcagtggctcacgcctgtaaccccagcactttgggaggcccgaagcaggcagattgcttgagccagaagttcaagacaagcctgggcaacatggtaaaaccccatctctacaaaaaatacaaaaaaaatagctgggcatggtgttgcacacctgtagtcccagcacacaggaagccagaggtggggggatcacctgaacctgggagataaaggctgcaatgaaccgtgatcacgccactgcactccagcctgggcaacagaacaaaaccctgtctcaaaaaaaaaaaagaaagaaagaaagaaacactcttagatatcaagtaaactactaaaatagataaaatatggtgctgaagaaaagaaagattcatagaaaggaatgaaaagttaatatgtgaaagtatttagtacaggtaagaattcaaatcaaaaagaaaaaaatatgaattcaatacattgtggtgcgacaatgaggtaatgacctggaaaaaataaattgtattcttatgtcataatacacacaaaataaattacagataattagataattataaaaatattttaaatgctaataacggtgaatacagatatatgtttgcatagattatctcagcttatcttaactacagctctatgagatgatgggtactgttatcatcctcattttagagattaaaaaactaaggaaaagagttttattctatcattaagaaagtatttctaagcaggccaggtgcagtggccaacgcctgtaatcccagaactttgggaggccaaggtgagcagatcacttgaggtcaggagttcgagaccagcctggccaacatggtgaagctctgtgtctactaaaaatataaaaaattagccgggcatggtggctcgcacctgtagtcccgctactcaggaggctaagacaggagaatcacttgaatccaggaggcggaggttgcagtgagcccagatcatgctgctacactcgagcctgggcaacagagcgagactctgtctccataaaaaaaaaaaaagatatttctaagcataatgccaaactcctggcctcaagtgacccacccacctaggcttcccaaagtgctgggattacaggcatgagccaatgcactcagctgtattggcaaatatttttcaaaaataatagctagtgtttgtttatggaggagtaaattgttaataacctttttggaggacaatacaggaatatataacactttaagaaaagtatacttttttttttttttgagacggagtctcactctgtagcctaagctgcagtgcagtggtgtgatctcggctcactgcaacttccgcctccagggctcaagtgattcttgagcctcagcctcccgagtagctgggactacaggtgcacaccaccacatctggctaattttttgtattttagtagagacagggtttcaccatgttgcccggggtggtctcaaactcctgagctcaggcaatctgcctatatcagcctcccaaagtgctggaattactggcgggcgtgagccactgtaccatgccaaaaaaaacatatactctttaactcaagtcaacttctaggaattgttcccttaaaaaaaatcaatccaaaaagatgtatgcataggggcatttatcagagaactgtttacaatagggggaagaaaaaacagaaataaataataatcagtaacaggattggtgaaataaataattctacatcttttcactctctatcagaggaggaatttggagagtaacttgaacataacctatgataaatgttaatatcatatccaggataaatttctagaaaaattgaacctaaaggaataaggatacaagaacacaagaatataggggcaaaaatgttcagtaaagcattttttctaattcacggtgaaaaagtgagaaagcctaagtatccatccacgagagaataattaagcaaattaaggcaagctgtgaaatcttaagagcaggcatttcatcttgttctaggtgctgtttatgagcatgtctcacaaaatgtcttgatgaatacatgactacatccacattttggaaaacctttccacactctctgaaagaagcaagcaggattttagaaaacctttccacatgctctgaaagaagcaagcaggtccggaggcgagagtacacctgtggtctatgagatactgctgagtgggtaaagcaagtgcagaataacatactatgatcccattttcataaataagatgtgcgcgtgtatgtgagcatgtgtgtgtacgtgcatgtgtgcgcacatgtgagcatgtgtgtacatgcatgtgtgcacgcgtgagcatgtgtgtacgtgcatgtgtgtgcgtgtgtgagcatgcttgtatgtatgtgtgtgtgaacatgtgtgtatgtgcatgtgtgtgagcatgcgtgtgtacgtgcctgtgtgcgggtgtgagcatgcgcgtgtaagtgcatgtgtgcacgtgtgtgtgagcatgcgtgtgtgtgtgtgtgtgtgtgtgtgtgtgtgtgtgtgtctcataggcataaaggtcatggaggctatggaccaagttgttgataataaaccaagttgttaataagagtagaggaggtagaggactttcatttttttacttgatgccactcttcggcacaacttttcttttccagtattttagtaagtacatttggaatgcaaaattgttttcaatccaaactaaaaagaagggtgcctccataagatggaatgctctacaggtcactgaaaattatgccttggaagatttcaacagcatagaaaacacagactaaaatgggtcaccacacagtacataagtatgctccatttcttaaaatataaataatatacattgataaaagaaccagaaaatagatataaaatattaacaatcattatctgtgagtacgcaggccatgagagccttttttctctcttttccaaatttattatactaaacctacactgttttgaatcagaaaaagaaaacattttaggcatatagtactatgcattagagagcaagacatgaatacttacagaaataaataattaagagacactgcagcattacacaatgtaaaatggaaacttctgattaaacaacacaactgtgtaaaaaaaatcacaaagccataaaatcaccttgctgtaataggaaatcgcctctttatacttgtcaattatgtcttcagggctaaggcagttcttagcacgtccgatctcagtactggtgtcagggttgatgccattggtggtgagggcacctgcaaaccaagaggaagaaaagaaataatcttttgctttttctgtattatttctttgttaaagaggagcatgaataagacaaaacttaaatatgccctactgaaatttaaataatgtaagtgtttagtcttcacagcttatatgcttcctataatagccttgctatcaaagcattgtattaaatgttggttaactcaaaataagttttcctcccttttgaaattttttattgaagaacatgaaatgcattacataaaagtaacatatttacagtaactagctcaattgtcttgaaggcaatggtgaagtcagcacacattctctcatagcttgaagctcttcatgttagcaagaaaccaccccgcatcctcaaaggaggtcaactacgcaaaagcattttctgaaccacacggcattgaaaaaaaaaattataaatgatagtatgctttctatgcctttttctatttctgaccaactcctatcaataagcagaagcatctgattccccagccaccaaacccacatggacaagcattttggagcaacttccatttaaagaatataaccaactaaacagagaactctggcagaaaaaaaataaagataaaatattcattgacttcacagaacactcaaaaaatattctcctaaatctcaatagcagggaaagctgggcttctatgaaaccacttgtttagcttacagagagtgagcatctcccacaaatcctgtttcccttgcactgttgggaggctcagggatgagcctgccacccatctgtataacctcacaaggccaaagacgtgcatctcacactgccctcatcccctgtgcagctcacttcttacccttgttttctaatcttggtccagttttttcatctgcttattgtttgttctctaattctgtaagctgcctcaaaaggttttttggaacaagacagaagaataaacaggtaagtggagagatggatggacagatggaaggagaactctaagaaaaggagaacgaagcatttcatgtgcaaaatcctcttctggtgagggaagaaagaactgtaacagaactgtggagaggcaggtggtttaggactttgtttcctgctgattttgtgaaaatcacagcaagagacaagagggaagaactataaatgataatagaaaagggcatgcttggaaaaatatatctcaaatatgcactttttaaagaatagatccaaatcagcacgacccggtgacataaactgtgggtagagaattgagaactccatcccccaggtaccaggcaccccttcgagcagtgagcattcacacaggttgttataatgccataggggcaaaagcgacattttttcacactcagcggaagcaggacctacgtcaggaacatccacacgtgtcatcatctacagcaactctatgagagtattcttagtgtaccccatctctgcaggggaggagacaagatcctacagagattaaatctccttactagttctcacaattacagagctggtgaccccaagtaggaggccatcttgggcctatgttcttaacgacagaagtgtagtgctttgtgtgcttttcatgcttataatacatttgtttctagcataagttaatatttaataagtgacaaggagtcttgatttatttcattagctataatgaattatcttcacattgttgagttttactctctttttttcccttggagaaatggtgggggggggcgggtcagaatgaggtgggtttttcattcttcacatggtatctcatctcttctctgaggagtaaatgatcaaagcataagagggaaatccccccgacggagaaggaacaagtgctccctccaccttttaaagaaagggcatctccagtcatgagggctaatttgatcaacttaatttcttttttctttgaaacagagtctctctctctgtcacccaggctggagtgcagtggtactggagtgcagtggcacgatctcagctcgctacaacccccctcctcgctacaatcaagtgattctcctgcctcagcctcccaagtagctgggatgacaggcacccaccagcaagccccactaatttttgtatttttagtagagatggggtttcaccatgttagccaagctggtcttgaactcctgacctcaagcgatctgtccaactcgacctcccaaagtgctagaattacaggtgtgagccactgcgtctagctgataaacttaatttcaacatcaaggctagaggaaaaatttctatgtggagcaaccaagaaaaatataaaccataggaaaataacaagagcatcgctcccaagagagcttagtgggtcagaccaatttaatttcattcaacaaaagactaataagttctagaaacactagtaagccatagatttgatctttcttgacatctgtaaagttgtgacagcccgtatgagatgtcatcatgaactagtggaccagagccatcaagacccatagcctgtagattacaggcaggaaaatcaatgccacaggaggctaagacccagatgggaggagagacaaagaaagagcatggatgagaagtcacggggaggggggaaggttgaaaaaggcaccaccaaaaaggttctcaagtatcagcccaacaatgctttcatcattcactaaagagataggtactgagctgctaccacacaagactgtatacaaggcacaaaactggaaacccagacatacacataagataaagcaaaaaaaagaaggaagacagcagagatggatgccgcttgagaaaggtttgcctttctctcctagagagaagcacaaaaagggcttagatacaccaagaaccagtgtggcaataatttcagcaatggctaacaggctagcaccagcctgggtcactaacatctgctgtccaactacaaagcaaaaaccctgctacgtgggcactgtaggctttattttgcagaggaatggcaggaagacaaggcatccataagccacagggtgggatcgagtcctccagcaccaggacacagtgcctggaatcactggggccaagatggactttttaataatggtctgggacacctgagtggccatttggaaaaaaaaaaaaaaaaaatcaaacccacacctcacaggagacacaagagtaaactccaaatggatctgagatctgaatgtaaaacagaaaaccatagttcaaaaaacacaggtaaattcctctaaaacctggacaaaggaaaaggctctctatcacacaaacctaaacgcaataaaagactaatatattcaaccacataaaaactcagcaaaattactataaacacagcaaaacataaatgataatctgatttaaaaatatatgcaacatatatcacaaacggctaattccacatacatcaaggtcacaaaagttgaaaaagaaaaacacaactaaaaatccaacagaaaaaaaaaatggccaaaagatttgggcagataattcataaaagaaaaacataaaaatgacccttaagcatttaaaaagatattcaacttcattaatggtaagagatgccatttgtcacgtatctagttggcaaaaatgttaaaagcctgacaacacacagtgttggtgtatatatgtagaaaacactcgcatgcactgctactgtgagtgcgaatgatgcggcctttatgaagaagactttggcaggatctagtaacactacatttatgtttactttttgacccagtaattccacttctaggaatttacactgaagacacaccttcaacagtacagaaacatacctatgcaatgtgatttgctgatatattatctgtaactcccaaacactggaaacaatcaaacatccacatgcagaagagtggtgaaataaaacccggtacctgcacacttagtgtgccacgcagctgtgaaagtggatgagaaagatctccataagctgatatggactgatctccaggatacattagcaaccaaaatagaacaaaaaacaccaagtacaaaagaatatatgtaatatcttaccttttgcacaagaaaaagaattaagaacattaatgtgtttatttaaaaaataagaagaagaaaaggccaggaacaaatgatataagggtagggaaatgaggtggaaagaataggagaggcgctgggcgcagtggctcacacctataaccccagcactttgggaggccaaggaaggctcctgggttgagcccaagagttcaagactagcctgatcaacgtggcaaaatcccatctccacaaaaaaacacatgaaaattagccaggcatggtggcacacgcctgtgattcccagctacttgggaggctgaggcaggaggactgcttgagcccagaaggccaaggctgcagtgagctgtgatcatgccactgcactccagcctgggtgagggcatgagaccttgtctccaaaaaaaaaaaaaaaaaaaaaaaaaaaataggagaggaagtggcacttctctgggtaaccctttttatatagttttgatttttggaatcatattaacattttatatagatttgaccaggcgcaatggctcatgcctgtaagccctgccctttaggaggctgcggcagacagatcgcctgaggccaggagttcaagaccagcctggccaacatggtaaaaccccagctctattaaaaatacaaaatttagccagacatggtggcatgcgcctgtagtcccaactactcaggaggctgaggcacaagaattgcttcaacccgggaagcagagattgcagtgagccaagatcatgccactgcactccagcctgggcaacagagcaagactccatctcaaaaataaaacaacaacaaaaaaaaaggccgggcgcagtggctcacgcctgtaatcccagcacttcggaaggccgaggcgggcggaccacaaggtcaggagatcaaaaccatcctggctaacatggtgaaactccatctctactaaaaatacaaaaaattagccaggcgtggtggcgggcacctgtagtcccagctactcgggaggctgaggcaggagaatggcgtgaacacaggaggcagagcttgcagtgagctgagactgtaccactgcattctagcctgggtgacagagcgagactgtctcaaaaaaaaaaaaaattatatagatttagaaatataaaacagcaactcaaagaactgtaaaaataaaaaaaggaaaaaagattttaaaaatcagcaaagatggggaaactcattaatgatatataaacagcaataattacatttcaaataacataatcacactgacaggaagcattaaaggacaaattcaagtaacctctgactgcagcaccctgtgtatttatccttggtatcatgaccaaggataaataaccaaaagaaccacaaccaatccttgaactctaactctaggtacgggttttgttagttagttagtatgaacttgacataacagtagaacttctcaaagggcctagaatcaatgaaccttaggagcaatgagcatgcttagtgaccagaccttggtttctaaataccactttccaacaaaagaaactaaaactccttagaaaaacgtccgattccagagctggaacagggaaagtacaaaatgaacctaaaatatctttctatgtttttgagatggagtctcattcttgtcgcccaggctggagtgcagtggcgaaatcttggctcactgcaacctccgcctcccaggttccagcgattctcctgcctcagcctcccaagtagctgggactacaggcacccaccaccacgctcagctaatttttgtatttttagtagagacggggttttgccatgttggccaggctggtcttgaactcctgacttcaggtgatctgcctgcctcaaattcccaaagtgctgggattacaggtatgagccaccgtgcccggcctgaacctaaaatatcttgagcctgaaagtaaacatatgttcaataactgattgaggaacatgtcaaaaggttttaagaatcagcttgaagagcttccattggccaaatctagccaatgagctacaaaataaagaataatagcaatggattagaacctactaaaaaaataatgatccataagtccataacaataagtggatggatggaaagaaagaaggagaaaagaaaaaaaaagctcctgcttatagtaaaatgcgaataaacacataaggaatgatgaagcaagaaaatcgccatttggcagccagcacagtaataactgactcaggtgaaactcttcactgaatcagccagaaccagtgggtgaaagtgtgatgacaaacaagatgtatacagtctcaaactatttcccacaaattacttattatttacatcgagaaaaatagtaactttacagtggaaaactccatcagactccactttaaccaattatcaaagttagcctcaccagtaatgggacaaatgaacctcatgtgcctctgatttaatgcatgatggatcacttgacccctccttctgccctgccaaaatgcaaaacctcataatcaaaaagcaacttcaggcaaacacaaagtgagaacattccacaaaataaatggcctgcattcttcagaaatatcaattatcatgaaaaacgaagataggctgagacgatactaagtgccataaacactaaatgccgtgtgtgatcctggactggatcccgcatcaggaaatagaactgctgtattggaacagctggtggaatgcaaataaggtctggggggtagataaaggtattgaatgcatcaacgttaaattctctgattttaatcactgtactgtttatgtgaatgaccttgtccttaggaaatgcacaccgaggtattcaggacagggcctcaggtctgcaactcactgtcaaatcgctcaaaaaaaactttgtatatgcacagagatcaaataataaagcaaatgataacaactgggaaatacgggtgaagagtacatcagaattatctttaccactcttttataagatttataagttttaaattatttcaaaatcaacagtttaaaaaaattagaattacagtaaactcattaagctacaaaacaattctattatattaaaaacaggatgtatttcgtaaagacaaaagcgctaaaacatatacaactgggaatataaatgaaatgaaaatggggaagataaattacaaattaagatcataggccatgatccactggtctttgtgtctgggaaaggaaaggaaaaaggaaaggaaaggacataggccatgagcagaatgagtcacttcatcacttacacactcataacactcgctaagtgtcaggtgctgagctgggcacggggaatccactgccacagcagtgtgtgcaataattaaaaagtcaccacccgggtcgggcacggtggctcacgtctgtaatcccagcactttgggaggccgaggcaggtagatcacctgaggtcaggagttcaagaccagcctggccaacacggtgaaaccccatctctactaaaaatacaaaaattagttgggtgtggtggcacatgcctgtaatcccagctactcaggaggctgaggcaagagaatcgcttgaaccagggaagcagaggttgcagtgagctgagatcacacattgcactccagcctgggcaacaaaagcgagactgtctcaaaaaaaataataataaataaataaatagtcatcatctggacaccatgatgaaaggaacataagcgtcaggccagcctttggctttactgacagctgccagacacctactgaagaacaaagtcttttttttttttttttatactttaagtttcagggtacatgtgcacaatgtgcaggttagttacatatgtatacatgtgccatgctggtgtactgcacccattaactcgtcatttagcattaggtatatctcctaatgctatccctcccccctccccccaccccacaacagtcctcagagtgtgatattccccttcctgtgtccatatgttctcattgttcaattcccacctatgagtgagaatatgcggtgtttggtttttagttcttgcgatagtttactgagaatgatgatttccaatttcatccatgtccctacaaaggacatgaactcatcattttttatggctgcatagtattccatggtgtatatgtgccacattttcttaatccaatctatcattgttggacatttgggttggttccaagtctttgctattgtgaatagtgccgcaataaacatacgtgtgcatgtgtctttatagcagcatgatttatagtcctttgggtatatacccagtaaggaaccaagtcttgaaggaaggtctgattctttttcttccccaggaacataaaaattctggaataagactggagatacatcatcaaaagaattaaagggaaattgacccaagaagaaatatgaagaagttgtggtttttaagcaagctgaaagaagataaaggaagcatgaccaaaaaatattctacagtagaaatttttaaaaaataaaaataaaaagaaggccaggagcagtgacttacaccaaaaatcccagcactttgggaggctaaggcaggaagatcacttgagcctaggagttcgagaccagcatgggcaacatagtgagatcctaactctacaaaaaatctaaaacttaaccaggcatggtgtcatggccctgtagtcccagctactttagaggctgagatggaaggattgcttgagcctgagaggttgaggctgcaatgagccatgatcatgccactgcactccagcctgggtgacagagagagaccctgtctcaaaataaatgaataaataaacaaataaataactgaaatcatttaaatgtgttctccaaccacaacagaattctttttttataacagaactattttagatatcaacaacagaatgaaatttggggaattcacaaatacttggaaattaaatagcacacagctaaataaccaatgggtcaaagaagaaatcacaagacaaattagaaaacactttttttttttaatttgagacaggttctctctctgtcccccagtctggagtgcagtggtgcgatcttggctcattgcaacctctgcctcccaggttcaagcaattctcctgcctcagcctccccaggagctgggattacagacgtgccaacatgcccaactaatttttgtatttttagtagagatggggtttcaccatgttggccaggctggtcttgaactcctgacctcaaatgatctgcctgcctcagcctcccaaagtactgggattacaggcatgagccaccacgcctggcctagaaattagaaaatactttgattagctgggtatgatgtcatgtgcctatagtctcagctacttgggaggcgaaagcaggaggatctcttgagcccaggaattctaggctgcagtgagctgtaatcgccactgcactccagcctgggcaacagagtagaaccttgtctaaaaataagaagaagaaaataaaaataaaaataattggaaaaaaaatactttgagctgaaaactggccaggtacagtggctcacacctataatcccagcattttaggaggccaaggtggccagatcacttgcggtcaggagttcaagatgacctaggccaacatggtgaaaccccatctctactaaaaatacaaaaaattagccgggcgtggtggtgcacgcctgtaatcccagttactcggaaagctgaggcaggagaatagcttgaacccaggaggtggaggttgcaagtgagccgagatcatggcactgcactccagcctgggtgacagagtgagtctctgtcacacaaaaaaaaagaaaagaaaaagaatactttgagctgaaaaaaaagccataatatactaaaaatgatatgccacaaaagcagtgcatagagggcaatttgtagctataaatacttacattttttaaaaacaggccaggtgcagtggctcacatctataatcccagaagtttgggaagcagaggtgagaagatcacttgaggccaggagtccaagaccgggcttggtaacatagagagaccccatctctacaaaaatttaaaaagtaggcaggcatggtgcatacctgaagtcctagctactcagaggccgaagctgaaggatcacttgagcacaggagacgactatagtgaactatgactgtaccattgcactctaccctgggcgacagagcaagaccctgtctcttaaaccagaagaaagagctcatgtcaacaacctaagaaactagaaaaagaagagaaaattaaattcaaagcaaacagaaagaaggaaataaagattagagcagaaataaatgaaagggggaattgaaaaacaatagagaaaagtcaacaaaaaccaaagttcattcttaaaacaaccacaaaattatgaactagctaagaagagagaagaatcaagttactaaaatcagagcttaaagaatagacattactaccaaccttacataaataaattgtaagacaatattatgaacaattatacaccaatgaattatctaatttagatgagttgggcaaattcccagaaagacacaaactactaaacccaactcaagaagatctagaaaatctaaatagacccataacaagtaaagtgattgaatcaataatcaaaaaatctcccagaaagaaaagccagggacacaataatagacagagagccaaatcatgagtgaactcccattcacaattgcttcaaagagaataaaatacctaggaatacaacttacaagggatgtgaaggacctcttcaaggagaactataaaccactgctcaacaaaataaaagaggacacaaacaaatggaaaaacatcccatgctcatggataggaagaatcaatatcatgaaaatggtcatactgccccaagtaatttatagattcaatgctatccccatcaagctaccattaactttcttcacaaaattttaaaaaactactttaaatttcatatggaaccaaaaaagagcccaaatagccaagacaatcctaaacaaaaagaacaaagctggaggcatcacgctacctgacttcaaactatactacaagtctacagtaaccaaaacagcatggtactggtaccaaaacagatatatagaccaatggaacagaacagaggcctcagaaataacgccacacatctacaaccatctgatttttgacaaacctgacaaaaacaagcaatgaggaaaagattccctatttaataaatggtgttgggaaaactggctagccatatgcagaaaactgaaactggacctcttccttacaccttatacaaaaattaactcaagatggattaaagacttaaacgtaggacctaaaatcataaaaatcttagaagaaaacctagacaataccattcaggacacaggcatgggcaaagacttcataactaaaacagcagtggcaacaaaagccaaaattgagaaatgggatctaattaaactaaagagcttctacacaggaaaagaaactatcttcagagtcaacaggcaacctacagaatgggagaaaatttttgcaatctatctgacaaagggctaatatccagaatctataaagaacttaaacaaatttacaagaaaaaaacaaccccatcaaaaagtaagcaaaggcgaaggatatgaacagacacttctcaagagaagacatttatgcggccaacaaacatacgaaaaaagctcatcatcactggtcattagagaaatgcaaatcaaaaccacaatgagataccatctcacgctagttagactggcgatcattaaaaagtcaggaaacaacagatgctggagaggatgtggagaaataggaatgcctttatactgttggtgggagtgtaaattagttcaactattgtggaagacagtgtagcgattcctcaaggatctagaaccagaaatatcatttgacccagcaatcccattactgggtatatacccaaaggattataaatcattctactataaagacacatgtacatgtatgtttattgcagcactgttcacaatagcaaagacttggaaccaacccaaatgtccaacaatgatagactggattaagaaaatgtggcacatatacaccatggaatactatgcagccataaaaaaggatgacttcatgtcctttgcagggacatggatgcagctagaaaccatcattctcagcaaactaacacaggaacagaaaaccaaacaccacatgttctcactcataagtgggagctgaacaatggtaacacatggacacagggaggggaacatcacacaccagggcctgtcagggaatggggggctaggggaaggacagcattaggagaaatacttaatgtagatgacgggttgatgggtgcagcaaaccaccatggcacgtgtatacctatataacaaacctgcacattctgcacgtgtatcccagaacttaaagtataataaaaaataaaaataaagaaaggccaggtacagctgtcttcaatggtgaattctaccaaatatttaaggacaaattaacaccaattcttcataaactattccagaaaacataagaggaaggaacgttaaccaattcattatatgaggctaatgttgccctaataccaaaaccagaaacagacatcaaaagaaaactacagatccacatttcttatgaatatagacgcaaggccgggcgcagtggctcacgcctgtaatcccagcactttgggaggccaaggcaggtggactgactgaggtcaggagttcaagagcagcctagccaacatgataaaaccctgtctctactaaaaatacaaaaattagctgggagcagtggcacatgcctgtagtcccagctactcgggaggctgaggcagtagaatcgcttgaacctgggaggcagaggttgcagtgagccgagatatgcaactgcactccagcctgggcgacaaagcgagactccatctcaaaaagatagatagatagatagatagatagatagatagatagatagatagatagacagacagacagacagatgcaaatatcctcaataaaatattagcacactgaatccagcatgatataaaaaggtttatacaacatgatcaagtgggattcagctcaggaatctaaggttagtttaatgtctgaaaattagtagaataaaggacaaaaccacatgatcatctcaacagacacaaagaaagcatttgataaattcaacaccctttcgtgatggcactcaacaaactaggctaaccaggcgcggtggctcacgcctgtaatcccaacactttgggaggcggaggcgggtggatcacaaggtcaggagatcgagatcatcctggctaacacggtgaaaccccgtctctactaaaaatacaacaaaattggccgggcgcggtgactcgcgcctgtaatcccagcactttgggaggccgaggcgggtggatcaggaggtcaggagattgagaccatcctggctaacacggtgaaaccccgtctctactgaaaatacaaaaaaattagccgcgcgtggtggcgggcacctgtagtcccagctactcgggaggctgaggcaggagaatggcgtgaacctcggaggtggagcttgcagtgagctgagatcgcaccactgcactccagcctgggcgacagagtgagactccgtctcaaaaaaaaaaaaaaaaaaaaaaaacaaaacaaaacaaaaaacgaggcatagaagggaatgttctcaacctgataaagggcatctgtgaaaaacccacagctaccatcatgcttcatgataaaagactctccctacaatcaaggataagacaagtcatccaaattagaaaggaagaggccgggtgcggtggctcacgcttgtaattccaacactttgggaggccgaggcaaggagatcacgaggtcaggagatcaaaaccatcctggctaacacggtgaaaccccgtctctactaaaaatacaaaaaaattagccgggcgtggtggcgggcgcctatagtcccagctactcgggaggctgaggcaagagaatggcgtgaacccggaaggcggagcttgcagtgagccgagattgcgccactgcactccagatcgggggacagagtgagactccgtctcaaaaaaaaaagagaaacgatgaaaaactctgtctcttttcagatgacatgatcctgcctctagaaaatcctaaaaaatccactaaaaaacttttagagctaagaaatgagttccacaaatttgaaggatataaaaccaatacacaaaaaattgtgtttccatatacttgcaatgaaccatgtgacaatgaaattaagaaaacaattccatttacaatagcatgaaaaagaataaaatactttttatttaacccaaaaaatttaacccccataaaaagtataaaatgatgttctgaaaactcaaaacattggctaaaaaaaattaaagaaggtaaatgttgaaaagacatccatgtccatggattacaagatataatcttcttaaaatggcaatattctccaaactgatcaacagtttggagaatctctatcaaatctctatcaaaatcccagctggattcttggtagaaaatgaccatctgatcctaaaattcatacggaaattcaaaggatccagaataaccaaaactatcttgagaagaaaagaacaaattcagaagacttacacttcccaatttcaaaatttactacaacctacctggggtgggggaggtatgggtaatttttaaatttatttattttctttacctttattttctaaattctctataatgaagatgacttttacaataaggaaaaaacatgattttgtttttacatttttttttctttccaacttttatgttcaaggggtacatgtgcaggtttgttacatgtataagttattttttaaacatgcacacctactgcttaaaaaaatgtataaagagataaacaaatatctagtgaaaaataacttataaataagagtatatttaagtttttcataaattgaaaacttaaaagcaaaaacccatcaagttcctagggaaatttgtataacatataaaaacaaattcattttcaaaagttctagttgaccaatgaaaacccaacaaacaaagggaaaatcacatttgatagtcaactttaaacacatggagaggaaaaggcctagaaattacagccccagccaggtaatgtggatcacgcctaaattcctagcgttttgggaggttgaggcaagaggctcacttaaggccaggagttcaagaaatcacagctcctgtaattcagatattaactcaatataatggaaggaaacctttccctaggagacagtggaattctgtgcataagacaggataaactcagcccaaagtgcactagccacagtgatgattttttaaatagaattctaaagttagaatattgttgaaaagctgccaaagcctctgaaagacggaaatacatgcatgaacacacatatatataaagtctacccccatgctgcatataaatgttagcttatttttgcttactcatgggcactaattactttaatggagccagaatattttaaattatgacaggtaatcaatattacatgacttgtcaaatctagttaacgaatttactctgttgtgtaaccataatacgtctaagacatctaaaagcagtgaaaatacctttgtatgtttttgttttctggaagtctttacaaaattccaggctttttctatacatctgagagatatttctatatgatttttaccttgtgaaacaaacaacagatactgttgtcaaaattctgtcattgtacacagtgactgaagaccgccatactctagctaatccgctggacaatgaggcactatgccaggcactgtgcgagggaacaacaggaaaaaaaggaagacaacgaccgtattctggaaaggcttacaatctgtgtcaacactggggatttttttcctttagttaacgaaatggaatcaatcaaatactgtttttgaactttctgtagtcatgacactacctttattagtgtgatgaccagaaaagccttaaatgactttgttagctcaactagcagtgatcaccactgcagagtaagtaatgcagaaattaactgatagcaatgattctgcctacattcgaccaaaaataaacctacgccgaactctgcaaggtgaatgaagagataaggtccctcatgacaaaaaaaaaaaaaaaaaaaaaaaacgggcaagaaatcaaacaagcaaatagttttcagtaaatgattccctaaaaaaagcaatagagtatggtggttaagaggataaatcctgggtgcaaactcatgagtttgaatgcccacatcaccacttactagctatgaccctcagcgagtcagaaaaccttcctgcatctcagtttccccatttatagactagggataacaacagtacctgtctcctagaatcgtgaagattaaattgctttaggtgtaaagtttatatagagcaccttaagtcgtagatatgacatcaaaagcacaggaacaaagaaaacataaactggatttcatccaaatttaaaacttgtattggcttcaaaggacaccatatcaagaaaatgaaaagataacacacagaatgaaagaaaaattttgcgaatcatatatcaaaggactcatatatagaatatataaaaaactgttactagccaggtgcagtggctcacgcctgtaatcccaacactttgggaggccgaggtgggcggatcacctgaggtcaggagtttgagaccagcctggtcaaaatggtgaaacctcatctctactaaaaatacaaaaattagccgggcgtggtggcatgtgtctataatcccagctgctcaggaggctgaggcaagagaatcgctcgaacccgggtggcaggggttgcagtgagccgagatcacaccactgcactccagcctgggcgacaaagcaagattctgtctcaaaaaaaaaaaaaaaaactgttacaactcaacaataaaaagacaaaaagacaacccaatttaaaaattggtaactatctaaatagatattttttcaaagaaaatatagagatgacaataatcacatgaagagatgcacatcattagctacgagggacatgcaaaccaaaactacaatgagacaccaggtcacatccaccaggatggccacaatcaaaaaggtaacaagtattgacaaggatgcagagaaattagaacttgcattcattgctagtagtaatgtaaagtggtacagccactttggaaaacaatctggcagtttctgaaaaagttaaacgttgagttaccacatgacccagcaactccccttcctagacatacacataatagaatttaaaacatatgggccaggcacagtggctcacacctataatactagcactttgggaggctgaggcaggatcacctgaggtcaggagttcaggaccagcctggccaacatggtgaaaccccttctctactaaaaatacaaaaaaaattagccaggcatggtggtgggcacctgtaatcccagctatttgggaggctgaagcaggagaatcgcttgaacccaggaggcggaggttgcagtgagccaagaccgcaccattgcactccagcctgggcaacaagaatgaaactccatctcaaaaaacaaataaataaataaatcaaacaaacacatgtccacacaaatgcttataacatcattattcataatagccaaaaggtacaaatgatacaaatgtccatcaactgatggaatatggaaaaacaaaatgtggcatacacacacacacacacacacacacacacacatcacatatatacacatatacatacacatatataacacatatacatacacacatatatacacatatacacatatatacacatatacacatgtatacacatatatacatatatacacatatatacatatacacacatatatatacatatatatatacacagaatggaatattattctgcaagaagaaaaagaaatgcatactgacacgtgctatacgcatgaagcttgaaacatacagtaagtgaaagaggccagtcacaaaaaccacataccattatatgtatgatgccatttatatgagatgtccagaacaggcaaataatagagaaagaaaatagcttactagttgcttgggggtaagggaaggacataggcaaaggagagtgactgctaacaggtatatggcttcctgctggggttatgagaatgtcctaaaactgattgtggtgagggttgcacaactttgtaaatatactaaaaatgactggattttaccctttaaataggtaaactgcattaaaactagtttgtttgtttgtttgtttgtttttttaaaaaaaagcaccttagaacagtgtctctcacataataagtgcaaactgctcatttttattacaggaagaagaaactctcctccacatgaaaacggaaaaagcaattatgagtcaactaaaattatccaaaagatcattttacgtaaagtagttgctgaatgtacacgaaatgtttagaaattaaattaaaaaaaaaaaagatgccaggcacagtggctcatgtttgtaatcactttgggaggcaaaggtgagaggattgcttgaggccaggaccagctgggtcaacacagagagagactccatctctatgaaaaaattaaaaaattagctgggcatggtggcacacacctgtagtcccagctactccagagactgaggtggcagaattgcctggagttcaagggcgcagtgagctaggatcgcgcctgtgaatagccactgcactccagccttggcggcagagtgagaacctgtctccaaaaaaaaaaaaaaaatgaaagaaatgaaagaaaaaaacacaagaaaaaagagttttaagaatcattccactttaaaaatgcagataaagaacacaaaggcctagctgctagaaatgctgggaggggaagcttagttcttaggatgagagatggaggagcccccgaaaaccgtgaaactcttcttccggttttggaaacggtggtgaggaaagcgggtaggaaaaaaatttggaaacagtttgcttcaaacattatgtccatttaaaactcaaaaatcaaatgaaagtgatgtaattttgtgatagcttcacatgaatgggttttccgggagctgaacaattttacaacccctgagagagtgttagctattcagatagagaggctgtgaagaatcaaattgcattgctcctaggagctaggaagattccctaccagcactgtcactgctaacacatttgcaagggtttagaaaggaccaacgcttgaaagacagatatgatttcagtagcgagtcagtcctgatacaaaggtccccaagagcagaggccagaaggcattagcaggaactggcgtggcctggaaggcaggaaccagaatgtggggccaggacggcatctcattctctttactcgctctcccattggtaaagagaagtcaggtccacacgtttctcatttgggaccattacagaggatgtcctcacataccaaacactggtttctgggtccttcctggcagttttcacctctacagcagaaccttgatgcacccttgaataacaaagccccacagaatctcctcacttttcctcccaacactctaaactcaatttcacctctacacaaccttatcttgaaaagcgtcggaaatctttttaaaatgccttatctcaacaaacgcctgatttttcttatagctctaagctacttctatatggtgtacacatctaattctcctacaactaatgtgattgacacactgcaattcagtattttatagcaggcataaccagccaaactggggctcagcaactcatactggtcaaataccagtacattcaacatccatttcatttgtcatcagtgttggcggggctttcagctcttcagtggcataaagtctgcccgcctgactgtcccccagatgccttctcatcagcaactcaggtctcctgaaaccaaaactaagcatttgttgtcctttctctacacattccacaaactccatcaggaaacttagccacggcctagagaaaggagtgaacgcaaatgttaaaaccaacgcctgcaaacctggggcaacttcatttcagagccaagatgcacgaggcgatgaaagcgaatgtgttagtcacaaaggctgtgtaagcacagccatctgatttcaattctagactgttttcattttgtattatttaccctgtcattgtttctcattaagtcagaaaataatagagctcatcatgaaataattaagcactgtaataaaagaggtttttgctgtattaattacagaagatattacaaggggaagaaaaacctgcctttgtaaaaactacgagatttctttccctgttaagaacacacagacgaaatgcagtagagaattaactcacgtggaagggagcacaagccacaaatcagagcaaagtcgtgattacaaatgaattcaaaattaacaggacaaacatgctcaatgcattcaaagaattaaaggcacaattctcaaatcattcacttagccatgctagaggaagaagcctcctcttcaacagacaacataaagcaacggggtgcccatcaagcaaggacccaccaatcaatcatcaagcttttaacagttctgatttaaagttacttaaatcagaatgttccaaagatcatcatccagaaattttaaccattcattcacatcaccatgaaacaagcacttaaaaaaataaccaaaagaaactaaacacatagatcatgtacctggatcaatgagaacttcctgtgcccctggaagaaagaacagattatggtattttatttggaaaacaaaactacttttaaaaataactactaaaacacatttcataattcacatagcctagagaaaaatctgacttgtatctgatcagaaaagcaattctgaggaacagtatgttacaagtttggtgcctttttgcttcagacaggaaaagagaaaagaaaagctactattactcataccctaaacaaattgttaagtgcctcctcacctctctgccttcccactttctatgttcatgctcccagttctttttttttttttcttttctgagacagagtcttgctctgttgcccaggctggagtgcagtggcgtgatctcagctcacttcatcctctgcctcccaggttccagcaattctcctgcctcagcctcccaagtagctgggactacaggcgtgcgccaccacgaccggctaattttttttttttttttgtatttttagtagagacgggtttcaccatgttagccaggctggtctcaaactgctgggattacaggcatgacccaccatgcccggcctgccagctcttcttaaacaagtatgacaattccttatttccacaaataagccaagtgacaaaggattattatttgtgcaaatgtatgtcagcagcctagaatgggggagaaaaggtgccagtggctctgtggaacttttcacaacccccctaaaatacatctctctatatatatatctctctctcacacacacacacacacacacacacatacacacacagaataattggacacttcatcaagttaaagatttccagcttttagaaggtagctttgtagttagcttaaaatacaaaactattaacttcactattatgaagaaacttttgaaagccttggtggtctgctaaactacccaaacatctgtgtgatccaattcaacttctctatagaatgcaatttcccatcatggcaaaacacacctcaaggggtactggttccaagagtcatgtttatcattagctattttcatttttaaacatgttaagaagattcaaaaaggtatgtcccaataatcttatggaaatagcacatgtattcaattgtctacacagagaagaggccccatgattatggtgctatttaagagctattttgtgtacagccatctgtttgtaaacgcagactaaaaatcactgcaatcttgacgccaccattaaaataaaaaacaggtgttttccattgaataacacctttctgccaagcatgatgcttaacaaatatcatgtatgaccttcagagcaaccctacaaaataaacagatattaaccctccctgcctatggggagactgaagcccagaggagccaagggaagccccaccgccacacacgccacaacaccaggtccaaggtctgcactgagcagacgttcagctgcacagaccttgaggaagtctggatttccagataacctagaaacgttttgttctgtgaagaacctggccaaatatattatactatgccatgtcctttaggtaggggatatgagttaaacttttgatgccccagagttattatcacaatcatcaatcatttgactattagtatcatcagcctctagtggactgatttcacattaaccaaacttgtaagagaccagtgtaggaaaactggaggtttaactattaatgtaacgggagacacaaaattatcaatcagaccaaaatatcagggttcaacgatcagcacattttctcttcaaaggccaaatcacaggcaggagataagtagaaatcaggtccatacgtctcatttgggaccattacagaggatgccctcacacaccaaatgctggtttctaggccctttcctagtggttgtcacctctacagcaggatcctgacacctgaataacaaagcctcacaccatcacccctgcctgtaaaatgaagagagtgggccgatgcttcagtttgttcctgttctaaggtaagcctctgtgagcctcatcttttgtttatatttaggggcattaaagtgttcagatggggaactgaataccactcccttccctgaaacagaattcagtagttgtattttgttgaaatacaaatcaagttcatctagaaaactccactttctctgaacaggagttttctagatgaatttgatggactaaagttctgttacagggagaaacctgctgcctacacaaatgattaatgcaaaccgcagtgcactctctgtggacagtggccaagacacaaatgccagcgctgcataactctctctgtcccaccctttccacactggccaaccccctgactgatgtatagatgtatacatggaactgtagatatgctgatacctctaaaccccggaagccaatctactgaagctcagcccgactgccaggggttttttgttttgttttttgtttttctgtttttgtttttttttttttgagacagagtctcactctgtcgcccaggctggagtgcagtggcacaatcctggctcactgcaacctccgcttcccgggttcaagcaattcttctgcctcagcctcccaagtggctgggactacaggtgcgcaccaccacgtccagctaattttttgttgttgttgtattttcagtagacacggggttttaccatattggccaggctggtcttgaactcctgacctcgtgatctgcccaccgtggcctcccagtgctgggattacaggtgtgagccactgcacctggccaactgccaggatttaaatcccagctctgccacttactagctccataaccttggtcaagttcctcaacctgtctatgcctcagtttccacatctgtaaaactgggataataatccaacctaccttatctggttgttgtgaagattaaagggttaaattggtgtatataaaatgtgtgtagaggccgaggtgggtggatcacttgaggtcaggagtttgcgaccagcctggccaacatggtgaacccacatctctactaaaaatacgaaaattagctggtcatggtggtgcacacctgtaatcccagctactggggaggctgaggcacgagaattgcttgaacccgggaggcagcggttgcagtgagccaagattgtgccattgcactccagcctggcaacagagtgagactctatctcaaaaaaataaaaataaataaaatgtgtgtagcacattttaaatgttcaacagatgttatcagccaggtgtggtggctcacgcctgtaattccagcactttgggaggccgaggtgggcagatcacctgatgtcaggagttcgagaccagcttggccaacatagcgaaaccgtgtctccactaaacatacaaaaattagctgggcgaggtggcaggcgcctgtaatcccagctacttgggaggctgaggcaggagaatcactcgaacccgggacgcagaggttgcagtgagccgagatcacgacattgcactccagcctggatgacagagtgagactccatcccaaaaaaaaaaaaaaaatgttatctgttacagtgattttacaaatgtcccttctaatcatcctttgtatttccttactagtctaaatagcaaaggatatccttatttctgtgttacaaagaaagaactgtcaccccatgacctatttaaactgagggggaagatggcacttgctcttcactcctctggtttccataataaaggctttgtcctaagcaccactgacctcttgcccacccccattcctcccccacccaagtggagtgaggtgtaagatgagtttgggagacaagctgggcatgtgaaccccttcttttgcccttgggtgctgcactcaggaagcacacgggatgttctgctccgccatgcctatggctgacagggagagggcccctcgtaggaaggtctgctgtggcccagagccaccagatcttggacacacagtagtaggatgcccatttttctgcatccctcaagttcatggaaaatgtgggggttgttttttgttttttaagacaaggtcttgccctgtagcccaggctggagtgcagtggcagaatctcagctcactgcaacctctgcctcctgggctcaagcaatcctcccaactcagcctcttgagtagctgggactacaggcacgcgccaacatcccaggctaattttttgtattttttgtagagataggatttcaccatgttgcccaggctggtctcaaattcctgggctcaagcgatccatgcactgtggcctcccaaagtgctaggattacaggtgtgagccaccatgcccggcagagaatgtggtttcatcactaataagggcggaatttttattctctaccttactcttgtctcgtctctcagttggttgttgaagaaaacaggggtgtttttattgggcccctttaagccccaacatatactaatccacaaataattctgtggcttgggtaggtcaagatggctacataacggccatgtctctaaacctgcagctaaattatgggtataagaactactgaccctcctcgccgggcgcggtggctcacgcctgtaatcccagcactttgggaggccaaggcaggcggatcacctgaggtcaggagttcaagaccagcctggccaacatggtgaaaccccgtctctactaaaaatataaaaactagccgggcgtagtggtgggtgcctgtaatcccagctactcgggaggctgaggcaggagaattgcttgaacccaggagacagaggttgcagtgagctactgcactccggcctcggcgacagagtgagactctgtctcaaaaaaaaaaataaaaataaaaactactgacccacctcaaatatttccttcatttcctgagtctctcttcacgaaaacatttttcctatttcaatgccttagtaatttccaaacactataaaatgatgacttcatataaaataatagctaatggtcgtgagatattttatgagatgactgccacgctaaacattttgcacacattctctctaattctcacaattctacaaagcagaaattaggagcccctgctcatagatgcagagcgaggaggtggggggcacctgagaaagaactgtaggacttgcattcagacacaagccagctgaacgaggcttttccatgacaccacaacaccacccactagcaaacatgcaaaactgggtgcaatactcagggagttccagattcttttcagctttaaggtgctccagacagtttctatctcttttataaatcatggctgactgccttctgacattggaagaaaagtccaatttcaccactgtccacattgcacatctgaaattttcatgctgaaatgacataataaaaataactagaatacttttccaggtatccaaatataatgggcatagtgctattctaaagcattaaacaacaacaacagcaaaattcaaatgaaggaagccttgtctaagtcttctttcaccaacagggaaattaggacattaaaaatatatgtgtacaacagcgccacctatggccagaaaggtctttccaggttgctgaaaaaaaaaggtaacaaatttaattgttggcataataagaaatgatcaacagggctttttaaaatacgatgctcagagaccataactaaaagtgtaactagcacatactgaaatctgcttcaaggaagggaacagtattcagtatttaatccaaaaactttaacacccctaaatataaacagaagacacaggctcatagaaactaatcttagaacaggaagaaaactcgagcatctggcccactctcttcattctacaggtagtgaggttgagacccagagaatttgttcttctagcaatcagtggcaaagctttctcctagtccttggattttgcactataccaaaagccaccttaatctataccaaccctataatcataaaagtcacgtctggccgggcacagtggctcacgcctgtaatcccagcactttgggaggccgaggcgggcagatcatgaagtcaggagatcgataccatcctggctaacacggtgaaatcctgtctctactaaaaatacaaaaaattagccaggcgtggtggcggacgcctgtagtcccagctactcgggaggctgaggcaggagaatgacgtgaacccgggaggcggaggttgcagtgagccgagatcgcgccactgcactccagcctgggcaacagagcaagactctgtatcaaaaaaaaaaaaagtcatgtctctatatttcagtcagtaaatagcctaagtgtcttacaaaaaaatacttcccaaaggactgccaactattaatcatacaattttgttgaaatacaaacacatttatttatatattaaaacagcataatcggccaagcacagtgctcacacctgtaatcccagcactttgggaggccgaagcgggtggatcacttgagtcaggagttggagactagcctggccaacatggcgaaacctcgtctctacaaaaattagctgggcatggtagcacacacttgtaatcctgttactcaggaggctgagacacaagaatcacttgagcccgggaggcagaggttatagtgagccgagatcatgctgctgcacttcagcctgggcaacagagcaagactctgtctcaaaaaacaacacacaggccaggagcggtggctcacacctgtaatcccaacactttgggaggccgaggcaggcagatcacttatggtctggagttcaagaccagcctggccaacatggtgaaaccgcatctctactgaaatttacaaaaattagccaggtgtggtgacgggcacctgtaatcccagctactcgggaggctgaggcaggagaaccactaaaacccaagaagtagaagttgcagtgagccgagattgagccactgcactccagcccaggtgacagagcgagactctgtctcaaaaaacaacaacaacaacaacaaaaacacacataatctattcaacaatgtccccttgtagtcaatctataaaggaaaagtaactgatgtcaaatcaacgtttttacttttctcatctattacagatacaggaaaaaaatcaaaattttctcaatcacaaaaaagataagcctgaggcagaagaataggatctagaggcaaagaacttaaggttgtttcacacagacttcctacaactacattgaaaggaaaaccctaactttccatgactaagtaacaaaaggaccagaggctgctccctttgaccttttctgcatggcaggtgggaaactggctgtccggaaccactcagactgattgctggtggagtcttagtttgcagagaagtataactttgtctacttttcatttgcatagaagcataactttgtaacttcaccttagcctctgagtggctgctttccgcaaccaatcagactaactgcaggctaccacttcatttacaagaggtgagcatgaagtggccaatgggaaacttctagtgggtatttagacccaagaagattctgtatccgtgcccttgagcccgctgctcggcccactcccacactgtggagtgtactttcgttttcaataaatccctgctttcattattttgttgcttccttctttgtgacctatgcaacatgatgactaaatcctgagccattaaaggcaggttcattcatcaaggaccaaaacgttcatgttcattcagcattcgtgggtctgctctacccaagaagttttctcactcttcattggttctaccaagcataagcaaatcaaacaactcattgagagaatgtcatcagccaataaaataagaaactgctcccaggccctgaatcagcttattaaaattgacctctgggactagcttctcctaatacataaaattataaaaaagacttagacacagaacctcaagtctgttctaccaggaaattttacacaagtattccagaaatcaaccaatcattctaacccattagtggtattcagtaagattgaaagtattcaataaaatcagaacaaaatgtctcatacaagatttctgggcagggcatggtggctcacgcctgtaatcccagcactttgggaggccgaggcgggtggatcacgaggtcaagcattcgagaccagcctggccaacatagtgaaaccccgcctctattaaaaatacaaaaaattagccatgtgtggtggcgggcgcctgtaatcccaactagtcaggaggctgagggaggagaattgcttgaacctgggaggtggaggctgtggtgagccgagattgcgccactgcactccagcccgggcaacagtgcaagactctgtctcaaaaaaaaaaaaaaattactgactcaacagattttacagtttatttaaatattagtcctaactcaaaggaaaaagtaacaaatgagtctgctttatttaaagactgcaagtgagcagaggccggaaaaagggcagagctcacctggccggtgtctattggctgcttcagcaggaagggtgctgccctggaacctccgagctccactcttcccaccagttccaccaggatagtgatagatgacagaagctgaacacaatccttccagggcagctgggcattaagaaaacaaaaaacaaaaaccagaaaacaaaaaacaaaaaccagcatcattagtcaagtcagtgacccttcattagctcaaactgcagtaactaacaatgatttaaacaggtggattatttggaaatgccaatttttctcccaaaacaaagatcaaacctaaagatcactagttttttgcaaatgggaacttgccacctgtctttcccatgcccatgtccaggcaggcaatgcagaacactctcaccacactcaaggtttccctgcagggctgactgcacacgtaaaacaggccagcctctgcgttcatccattcacgtggccggcattcctgcacaaactgtgtggcagactgcgccaggttctggagctacagagatgtataacagaaagtgccctggattgaaaatatttcacagtaatagcaccaaagcaagaccagaatgcctttccagaccatgcaccccataggcatctgctccttttgaggttgtagtcctccctcttcctcaaaaacagccatattaactcgctacacagtccgttcttctctcatgacgtaacaacctaataatctccagctatgccacatgccttagaaggtgtgccacagtattcatctctatcatctttatccattaactcagtgctccttaaacttttggtctaaaaactccttgatgctcttaaaaatgacttaggatcacaaagagctttttttgtgatgtgggttacacctgtagatatttaccatattggaaaataaaactgagaaaaggatttaagtatttatgtattaattcctcttaaaataggccagacgcagtggctcatgccagtaatcccagcactttgggaagccaaggtgggtggatcacttgaggtcaggagttcaagaccagcctggccaacatggtgaaaccctgactctactaaaaatacaaaaattggccaggcatgataaaacacacctgtagccccagctactcgggaggctgaggcaagagaatcgcttgaacctgggaaatggaagtttcagtgagctgaaatcacgccattgcactccagcctgggcgacagagtgagactgactcaaaaaaataaaaataaaaaataaaataataagcttgtcatgtgttaacagttttatgaaaaataattgttttccaaaacaaaaataaagtactggaggaatggcattatttgacatgttcacacatttctttaatatcagagttaatacaagtcagctggatcttctatcagcttctacattcagtctgctgtgatgtcaggcctaagtagcttgtggacaactccactgtccacttctgagaggctgagcatggaagaggcccacggcacacagcaccgtccttctctgtgtgccctttaggagccctcctcatccagtccagcgccgcatggggaaggcatatgggcagtaccagtctttctggagaagcacctgctgcacatgccctagtctcagagcccactgggagatgcacagattctctaattgatacaataaggagtacttagggagacaatgctctttcaagaaaaccaagtaaaactatgtctttctcagcctgcataatcctttatctgattctcttttcttttccatccctaattcttactccctttctttccccacttctatttccctagcctctttaaaaaactaaatttaagtccattttaagttttattttggttttttcttaagagacaaagtctcactcttgctcaggatggagtgcagtggtgcgatcgtggctcactgcagccttgacctcctgagcccaagcgatcctcctgcctcaccctcacaagtagctgggactacaggcacagaccaccaagcccagctaatgtctttttattttattttattttattttattttggtagaagtgaggtctccctatgttgctcaggctggtctccacccagttaatgttttttaattttgttttgtagaagtgaggtgaagtaagatttttttattttttattttttgtagaagtgttgggattacaggcatgagccaccatgcctggccgtttgaagtatttcttatatttggctgggcacagtggcttatgcctgtaatcccagcactctgggaggccaaggcaggcatatcagctgaggtcgagttcaagagcagctcggccaacatcgcaaaaccccgtctctactaaaaatagaaaatttagccgggtgtggtagtgcatgcctgtaagtcccagctactcggaaggctgaggcaggagaatcgcttgaacccaggaggcggagattgcagtgagccaagatcatgccactgcactccagcctgggcaacagagcgagactccgtccccaagaacgaaagaatttgttatatttaatatgttctacggcacctcgttaaacttctgttacagaactcacctcattacttcattccgacttgtattatcataagtggctgacaggtgtccttgctaaactgtcaacctcaacgaaagaaccctgttttagtccttacccacacaatggactcagccagtccatcctcccaggaccacctccaggaggcgcagtccccaaagggaagaccacacacagacatccgattccaccacgaagtgtcagcaacatctcaggcagggcacccgctctgccgactgctgcgggggatcagagatggctgtgctttgaagtaggatttcttcttccctttcttttaatttttaagattgacatagagttcacataccatataattcacccacttaaagtgtgcaagtcagcagtttttagtatattcacaactgtgcaaccatcaccactaactgactctggaacattttcatcaccccagaaagaaaccttatgcccgttaactgtcacttcccattccccctcctcccagcccctagaaccagttgtctactttctgcttctatagatttgcctattctagccacttcatatatatagaatcatacaatctgcggcctttttcatgcctgccttctctcacttagcacaaagttgtcaaggttcatccgtgctgcagtggtatcacaatttcactccttttcatggctgaataatattccgctgtatgcccataccacatttcgtttatccattcatcatgtgacacatggaggaggttttgagggaggagtctaagaggtgaagatcatggggaacggcatccaaagcagagggcaaggtatactaagaacagaggaaaagggaaagtgtgggcagggcctccttcagaggacgcatggcagggtgggaggagggcagcagatacagcagggaagcatcccaggccactgctcgtggcaaccagcacaggctggctgcttttcctccctcatcccttctttttggggaatttcttctgccgtttcctctcatttctttttttattttattttatttttttttgagatggagtctcgctctgttgccaggctggagtgcagttgtgcaacctctgctcactgcaacttctgcctcctggttcaagaaattctgctgcctccgcctcccgagtagctgggactataggcgcgtgccaccacgcccagctaatttttgtatttttagtagagacgtggtttcaccatgttggccaggatggtctcaatctcttgacctcatatttggcctgccgtagcctcccaaagtgctgggattacaggcgtgagccaccgcacccagcctctcattttaattaacagttgaaacaattacatatcagatcatcttcatcagctcatcttacctccaagccacagaaagtcattcacagaacgcagcagctccaccgacatgtggtaatgcaccagggagtcctgcagcatccctgcctgcaggcacaggtcccccacgtgcttccgcatgcggccttggcaccgcttcttgtaatgtctagaaaatacatgaaaatgtatctttattactatacaactcccacccagaaagcactctgactaagcactattcaattctctcactactaaaaatgctaagaaggcaactgtaggctctataattttaagtcagcaataatcattgccagttatgtgagctggagtggtcttaatttcaaaaatgtactgccaagcaatttgtttaaaggtgatcggtacgtaaggacttctaccatgtctttcacgtaggcaatgttacagttggatttttctttttagattttccagttgtaacattagcataaggaagtttatgtttcagctttttaaaaaaatcaattatcttccacttcttaacatcaaacctcttattattttataaagacagctatgctgagtcttattagccaaccatttggctttagcaaacaagacgttcatcctcgctatttcagggcaagctttaggaaagcttccagagagcagggcctggggtgctcactaacagctctttaaatattggcaaggatataccactaaataatgcaaaggcttctgagtccctaatcaactcagaaaccaaagaaactgtaccaaagtattccttttatcatttttaaatacatctaacctttaaatgttatatttcttaagatagatgattttttttttaaagaaaaactgcagctggattaaactttccctcatcaagaaagcaaacttatcaagaataaaactcctctggaaatccagaagatgtgacgtttctaagtaaatgaatgttattgacacatctcaatacaatgttaaatcctatcatgtgtaactctaacgagttcaacaaactctttgttactctggaatttagcatttccattctgaataagttttaaacaaagatcacaacgtaaggcagacgcagaaagaaaaagaaacgccagccttcgtttgtctccttcctggccacaaggcagtgtcaggatggcccctgctaacagaccctccccataagaaaatacagcatctagcagggtgcagtggctcacgcctgtaatcccagcactttgggagaccgaggcgggcggatcacaaggtcaggagatcgagaccatcctggctaacacggtgaaaccccatctctactaaaaatacaaaaaattagccgggcgtggtggcacgcgcctgtagtcccagctactcaggaggctgaggcaggagaatcacttgaacccgggaggcggaggttgcagtgagccgagatcatgccactgcactccagcctgggggacagggtgagactcccaaaaaaaaaagaaaagaaaagaaaggcatctgagctgctcttcccatcccaacagcagtcacctcagcagcctccgcctagtctctgactcctcaccctgcacccccttccccttcattgcttctatacacacacagccagagtgtccttcccaaagcacaaatcagtctgtgtccctcccccactgcaaacctttcacaggatgctcaattcagtcgtagggagaggcatgcagtccatagctagcccctcccacggctctggcttcccctcctaccactgtggctttgcactccacaggcaaccttgctgcaacgctgaagtcccccaacctcaggctctatccgcctcacaacttccactctcttttaggctcatctcaatgaccaggttctcaaggaagccttccctgactccaacctctgcactttgggttaagtgtccttgatgtgtttctagaacactgttactttttttttttttttttttttttggagacaaggtcttattctgctgcccaggctggagcccagtggcacaatcacagctcactgcaacctccaagtcctgggctcaagagatcctcccacctcagcctccccagtaactgggaccacaggtgtgcaccacaacacctggctaattgttttttattttttgtagagatagggtctccttatgttgctcaagctggtctcgaactcctgggctcaagtgatcctcttgcctcagcctcccaaagagctgggattacagttctttgcccagccagctcttactctcaaaggtagacagtgttttgctcacttccttggtatgttatcctgttccaaatgggaaaaaaaaactcagtatccaaatggacattttcctccaccagtaacataactgtcaactcttaatacatgaataagtttacaaatactactgtatattagtttaatatattttaaattagactttaaagcaacaacaaaactttactcctaaccaattagaaaagatttgctttaaagcatcctaaagaagtaaattaggtcaggcatggtggctcatacctgtaataccaccactttgggaggccaaggcaggaggatcacttaaggctaggacttcgagacggctgggcaacagagcaagaccatgtctctacaaaggctcaggtgatcctcccacctcagcctcccaagtaactgggactacaggcacacaaccccttgctcagctaatatttatattttttgtagagacaaggtctcaccatgttgcccaggctggtctggaactcctgggcccaagcaatccacctgccttggcctcccacagtgctagatttataggagtcagccactgtgcccagcctacaaaaaaaattgttttaagtagcttggcatggtggctcccacctgtagtcccagctactcaggaggcagaggcaggaggatcacttgagccctggaattcgagactgcagtgagccatgattttgccactgctctctaatctgggcaacagaccaagatcctgtcccttaaaaaaagaaaggagtaaattattacatcttcacatgaacttcacaaaagtgtacacctgctgtagcaaaatataacccacaaaatttcaaaaatatttttctagtagcatcttctaaatacataacttgtttttaaaagtgcaaacattatgataaacaatttgttttgaaaacataggacttttacaaaaagtcatataaatactcttatagtttttcatatgaaagtcataatacaataaaaccatacaaatattttaaattgtataaaaacaaaatgaggccaggcacagtggcttacacctgtaatcccagcactttgggaggccgaggcgggtggatcacaaggtcaggagattgagaccatcctggctaacacggcaaaaccccgtgtctactgaaaatacaaaaaattagccgggcgtggtggcaggcgccgtagtcccagctactcgggaggctgaggcaggagaatggtgtgaacctgggaggcggagcttgcagtgagctaagattgcaccactgcactccaacctggtcgacagagcgagcctctgtcaaaaaaaaaaaaaaaagaagaaaatgcttaatatttttctgattttggtactatttatatggcttatggaaaacaagagcttggtattctagtccaaaaaacaatttatctggcaaataaatttctacattcaaatccaaagaaaagctaaagctgctcaacaacaacagtttgcaattaaaatccaagggaacctggatagagagaatctcttttgcagggtcggggatggtattacacagtttaagaagtctttgggcctggcgaggtggctcatgcctgtaatcccagcactatgggaggccgaggcaggcggatcacaaagttaagagatagagaccatcctggccaacatggtgaaaccccatctctactaaaaatacaagaattagctgggcatggtggcacgtgcctgtagtcccagctactcaggaggctgaggcaggagaatcgcttgaacccggaaggcagaggttgcagtgagctgagatggcaccactgcactctggcctggcaacggagcgagactccatctcaaaaaaaaaaaaaaaaaaaaaaagccaggcgcggtggctcacacctgtaatcccagcactttgggaggccaaggcgggcagatcacaaagtcaggagatcgagaccatcctggctaacatgatgaaaccccgtctctactaaaaaatacaaaaaattagccaggcgtggtggtgggcgcctgtagtcccagctaatcaggaggctgaggcaggagaatggtgtgaacccgggaggcggagcttgcagtgagccaagatcgcgccactgcactccagcgtgggcgacagagcaagactccatctcaaaaaaaaaaaaagaagtctttgtatacttaaataatggctacagcccataattttgcactacaatgttttggggtggggagccttttgactacgtgcctgatgtaaatacagtaagtatactaaaaggtgcccacatggtagagctaaagcaccaaagcagacaaacttaagatgccagagcagctgggcgcagtggctcacacctgaaatctcagcactttgggaagccgaggcaggcagatcatttgaagccaggagttcgagaacagcctgtccaacatagcaaaaccctgtctctactaaaaatactaaaattaggccgggcatggtggctcacgcctgtaataccagcattctgggaggccgaggcgggcagatcacctgaggtcaggagtttgagaccagcctggccaacatggtgaaaccccatctctactaaaaacacaaaattagccaggcgtggtggcgggctcctgtaatcccagctactcgggagactgaggcaggagaatggcctgaaccggggaggcggagcttgcagtgagccaagatcacgccactgcactccagcctgggcgacagagctagactccatctcaaaaaaaaaaaaaaaaaaaaaaaaagattagccgggcatggtggcacacacctgtagtcccagctactcaggaggctgaggcaaaagaattgcttgaacctgggatgcagaggttgcagtgagcagagaacatgccactgccctccagcctgggcaacagagtgagactctgtctcaaaaaaaaaaaaaaaaaagaactgcttcctcaatagtaactacaatgttcataagagggttttgttttgtgttttttatcttttgttaaaaagagctattccagaactatccaacagtccctcccccaattccccagcacctctctcctcaagatgcccttcctgatctgcccttctgggtccatgggaaagacagtctgttcagctgggactccatcctgctgccaggacggaggcggtgaagggcaaatctggccacatcattcccttcggatttctttagtagcagccccacccccagtacctttagaagaagtggcagctgcacctaaaacccctaactccgtggaataatatagaaaaccccagtcaggagcagtggctcacgcctgtaacctcaacactttgggagactgaagcaggaggatcacctgaggtcaggcgttcaagaccagcctagccaacatggtgagaccccccccatctctactaaaaatacaaaattagtggggcatggttgcagatgcttgtaatcctagctacttaggaggcaaggctggagaatcacttgaaccggggaggcggaggttgcagtgagctgagatggtaccactgcattccagcacgggcaacaagagtgaaactccaatctcaggaaaaaaaaaaaaaacaggatctgggctgtcctccagtctcctggtcacagcaagcacccaggggtcagcccggggccttcctcctacctccatctgcattctccctcgctcagctcatccaccttcagggttttcaacacaggctacatactgccaacaaccatgtgtctctctagtccacctcctgcccctgagctccggactcacatccgattgcctctttaatctctccgtttgaatgcccaacaggcatctcaaaaacacttcccccatggcctcccagtttcccccatggtaagaaacagcccaccggctactctgttcgagtcacactctcagacagatttctcctttctgtccatcatctcttccccacctctgtctctaaagtatatcacagcttcgtgccccagcacctagcacagcacatggcaagcttcccgtaaatgtgtgctgagtcacctctggaggtcacctgctaatgagggaggtctctcctggcacaggtcacttaggaaaggcgcttgtctctcacacaggaggtggagaggacagcccaggacaaggactcaagactctcctgtggtctgaactctgaagggcctgcggtccaggagagcacctgggttgtgaactccgagactcggctgccaggagagcaggggaggagggagcccgggccaggctgtccccatggatcctgggagccagtggcggcagaaaaggcccacaacccagggttaaaccagccaccactggatccctgccctgcattttccaagctggacagctacgacttcctgtacttaatacattcatgtctcttctgttccaccaccctagaatgtgatgaaatctttcagaaagcccagcctgtctcaactgggacaaagcaaatgaagaaagaaagtgttggtacttggaccagagcactgaggaagaaacaaggcccctgggcagtgaggtggtggcagcaggtcacagagcgagaacctttccctgagggggatgaaaccacaggggactaggccagccaaagagtgtcctgcagggctgcccttggtgttggagactctagatcagtaatgcaaacaaatgatgtgccaccagtgagggacattagcgtcaacaaatgcagacactggcttggtgcagtggctcatgcctataatcccagcactttgggaggccaaggcaggtggatcacttgaggtcaggagttcgagaccagcctggccaacatagtgaaaccctgtctgtactaaaaatacaaaaaactagcctggtgtggtggcacatgcctgtaatcccagctacttgagaggctgaagcaggagaattgcttcaacccaggaggtggagtttgcagtgagccaggatcgcgccactgcactccagcctgggcgaaagagtaagactctgtctcaaaaaaaaaaaaaaaaaaagcagacacagttatttctatgtcttacctacatgaggttaaatggaaagtctgtacaatagctaaggttgaactgcctctctggttctgaatgctcattggcagaagcaaaaaggaaagtggtcacttatacagggccttgtgtctgcaagatccaagtgaactagaaggccgtatttccctgacacttaaacaaattgcccttgagccctcataaggggcgcaaaagactggtgtgggtttttttgttttttattttgagatggagtttcgctcttgtcgcccaggctagagtgcaatggcatgagctcggctcactgcaacttctgcctcccagattcaagtaattctcttgcctcagcctctcaagtaagctgggactacaggcacatgacaccacgcccggctaacttttttatttttggtacagacagggtttcaccatgttgacctcaggtgatccacccacctccgccttccaaagtgctgggattacagatgtgaaccaccgcacccagcctggtgtgggttttagaatggcctgtgtctcctttacggtggaaagtcgctgaggtgaaggaaatgggaaatggcatgctccaggcagaagcaaaagaaaagacagccgcaccctcccgcagctcccctggccaccagcacactccagctccagcattccttgccttcatgcacggcccacagccacagccgggaatcacaggccagaaacgttcgctcagaagcccaggatcaagcatggcgctgcagcctgggacttttgcagttaagctatcccaggaaaaccccctaaagccgcctaaatcaattagcaattcacttcctcaaaacaaacaaaccaaagaataaaggctggtgtgtcactaaatgctacagactgaacaagatcccccagagcaaatattttagcaaacaccaaacgccaatgggttacctgctaaaaaaaagctaaaattaaaaaacatattttaaaaaaatgaaaagactatccagttaacatatagatttagacagcagtgtttgttttttaaagcagtgaaggctatgagaaggcagcacatagggaaatctagctatttttaatgcaacatgttgacagcctaccttttcagacccaataacacactcacagggcagtatgacagaaaaaaagaaaaagaaaaagaaaagaaagaggaacaagcaaaaattagaaacatataagaacagaaataattttgataactacaacactacatggacaagaatgggccatgggttttcatgaggggcacatgtgagctggtaagtaaattacacctacacctcgtgtaccggggaactccaggtcccgaaggtagaatgacctgtcaggaggcctatcagtatggtcaatgtgtcaaaccaaaactggccttacatctggacatttcctgttgagctacaaaataccaccccatttcaggttggacacttcctcactcctaccaagagctgcaggggagacaaggctttgttcctgcaccaaagcattccttcaaaaattagagaaccagccaggcactgtggctcacacctgtaatcccagcactttgggaggccgaggcaggtggatcacttgaggtcaggagttcgagaccagcctggccaacatggtgaaaccctgtctctactaaaaatacaaaaattagctgagtgtggtggcgcacgcctgtaatcccagctactcaggaggctgaggcacaaagaatcgcttgagcccaggaggtggaggttgcagtgagccgagactgcaccaccacactccagcctgggtgacagagcaagacaccatctcaaaaaaaaaaaaaaaaaaaaaattagagaaccatggagaaacaaaagcaacaacaggttacccattatgagaggaggatgtatttgatttgagttcactggtgtcattatctcactgaagttcaaatgctaactgatgtctaattgcggctgtcccactacagtgagcaagcagctttatgtgccactgtattttcagtgcctggagccatgcctggcatatgaaggctctaacaaacacttgtcagtccttatccactatgcgtgacgcactgcgtcacagcacactcccgctcctcctgcagagttgtgagctcagatttcaaaaggcaaaaaagacctggcatttgaaggtggatctgcaacctcacagccaagaagtggatgactgaaaaatgtcactgatgcccatgtggcaaaggaggaaggcatgagtcaaggggtcagagcaggattcctgacccatgctgcctgtgagcttcaacccctcaccccttctctgtaaagcaggggcaggccactccctgccgacctggcaggtggccgccaagctgtgcacaccatacagcaacaccttatcagggatgactcccacagtgcctgctggctggacagcagtgtgcgctattcacgaggcacaggaggcgcagcagaaggcaacaaggtgaggtagaaaggccccgggcctcagagacagacctggtgcttatatcagctctgctgcttggtggctgcccgggtctctaaaccttgctgcctcagccccacatcagccagcacagcaaccccgtgtagatcacagggctgccgtgaggattaaacacagagcaggtctacagcatgccttttcctttccttaagccaaatatgcacatttgggtgaagaaatgaaaattccttccttccagaccctgcaaagcaccacaggcaggtgcgactgaggctattccatgcttccaactctgagggctggatttaagactactgtgtctcaattctgtgatcatctctcctcatacttaccaacaaccagaacgacaccgtgtgaccttagataaatttcagaaacatactgagcacctactttgcagcaggcactatggtggcatgcaccttacatcactgaatcctcacctgtggctcatcagccaatcctatacaggaggagggagagccctgtccaagccaggaggccagtgactgacacagtgacacatcactttccctggcaaatggggacgccctcttggcaaacagctgctgcctaggcttgcatctcatccagctctgcagaacagccaccatggcaagacacagcagcaagcagagagtggaaggaagtggcaaggaagagctcatctgcaattttgatttgaaataaagtttttgacttaataacaggcaagatgggaagctgaccttttcctgctctatccaacactccttgtacacagagagaacagacatacttttcatttgtatacggtagctgtttaggagctcccaggtggtatttctggcatcctgatatccatgcttggctgctttgtaagtgaggaattcgacactgtggccatcaggagggaaaaagtagccacatacgcagggtgcacagcctggcaatccggagacgtgggctctacttctagctcagctaggacctagcccttacctctccagattcaccctctcatctgtgaaccaaagggacgagactgaataaaactgttcaaactgtgctctagcacagtgctgtccaacagaaataaaatgcaagccacgtaagtacatttcagtttctagttgccacatttttaaaagtaagaatgaaacagttgatactgatttttaaaatatagtttatttaacctaagatatgtaaaatactatcatttcaacatgtaatctgtataaaacatattagcaagaaagttggccaggcacagaggctcacacctgtaatcccagcactttgggaggccaaggcaggcagatcactcaaggccaggagttcaagaccagcctggccaacgtggcaagatcctgtctctattaaagatacaaaacttagccaggcatggtggcacctgcctgtagtcccagctacttgggaggctgaggcatgagaatcacttgaacccgggaggtgcacgttgcactgagccaagatcgcgccactgcactccagcctgagagacagagtaagactctgtctcaaaaaaaaattagcaagaaagtttattttttcagaagtaagtctcaaaatctggcgtgggttttattcacagcccatctcaactaaaactagcctcgtgtctagtgcccaaaagccacaactggctgtggctgctgtatgggacagagctccaggagtcccacgaggggagccccactaaaaagaggggagtgtacaagacaactctaaaggactcccccaaccaaaggctgtctctgtctttaaaagtcactggtttttgtttggttggtttttttagcagcactcaaacagattctgacagaaagtcattagttttaaaaaccaatggacaacacctttctactccttgctgcaatgaaattctgccctgtgctttccctttctgatgcagggaagccaaggggcctgggtctctaggtaagcttacctgctgtctgtgtccagtcctacaaagtcctttttctcaaacgggacacagagaagggggatcttatccccagacttgtctgtggctctgtccagacgcttggactccagcacgatgaacagtgactcgatgaagtcctcgattctcttctccaccgtctggcagtcctcgtagttggggtagaaagccacgtcggtgcgcggctgctccacgatctccccctgcagcccgaagacaaagagccgggagtcatacagtgtggagccgtagatctccttctgcacgtggaacttctcaaaggtctgtggccagtccttggccgagaagcagtctgtgatggtgatgaggcccacgactttgcggtgggtctggaagtcaccccactcgttgttctcgggtgggtagtggtgcctgtagcggatgtagaggactcgctgggagtcccgcacgctgatctgactcacagagcaaatcctcttatagatcctgaagaagttctcctcggagacgatgcccacaggctggaccaccacgagcagcgtctggtggtcctcagcacactgcatgtagtcagggacgctcattttgaagtccctgttcagagagaagaaatgaggctgtgagacacagagtcctgagtgctgagagcctaccctgggaggcagtgactgtgaccttcactacccagaggcaggggaagccccaaggaaagccgtggcatcaacaggtcttagggctctacacgtggctgtcgcagctctgatcataatgctgtaactgttgaccttcagtcccttggcctcagcatggagcttctacagaaatggggctgtttcttgtctttctattctcaccacctaaccaggagtagtaagagtcagtgctcaaaaatgtctgttgagtgaatgaataaacacgtgtgtaattgctcccccatcccctcaacaggatattaagaaaaatccaccatgcaatcacatctggatttgaattccgggctccctggaactcctcagctacaaaatagtggtgataatagaacttgtcttggccgggcatggtggctcatgcctgtaatcctaacactttggaaggccgaagctggcggatcacttgaggtcaggaattcgagaccagcctggccaacatggtgaaaccccacctatactaaaaatacaaaaattagccgggtgtggtggcacgtgcctgtaatcccagttacccaggaggctgaggcaggaaaatcactggaacccgggaggtgaaagctgcagtgagccaagattgcgccactgcactccagcctgggtgacagagtgagactccgtctcaaaaaaaaaaaaaaaagaggcggggcgcagtggctcacacctgtaatcccagcactttgggaagctgaggcaggcagatcacaaggtcagaagatcgagatcatcctggctaacatggtgaaaccccatctttactaaaaatacaaaaaattagcccggcgtggtggcaggcacctgtagtcccagctacttgggaggctgaggcaggagaatggcatgaaccagggaggcagagcttgcagtgagcccagatggcgccactgcactccagcctgggcgacagagccagactgcatctcaaaaaaaaaaaaaaaaaaaaagaattaaaagaaaaagaacttgccttataaaactgtatctagattgaggaggttgcgaatgtaaagggcctagcattgtgcctaacataaaaggagagattacacaaatataccacctttcctttataaatgggagagttgccataacctctctgagccaattttgtcagatataaaaagaaaacgttattacctgattccccagagctggggaaaaattaaattagatgacccacgtgaaagaatctggctcataggagatcctcaatacatgtttgttgaagggattagtgaacaaacaaacaaatgaacaatccaatgaatgctgcccccagcctacagacggtcatgatggaaatcccactgcctggaagtcagggccgatattcaactcccagctctacacgcacgatctgggtgacctggagcaagcctgtgtgcttccctgaaccctagtttcattgtgaataaaaatgaggatagtaacacatacctcaaggtgtcagcaagtcaacattctggttgtgataacatactgtggttttgtaacatggcaccacggggggaaactgggcaaaaggtatataggatccctcagtattatttctgacaaatgcacatggagctacaactactatagtctcaaataaaaagtctaatttttttaaaggttagggagattaaatgagctctctgtatcaaataagaaaaagatgcctcgatacacacctccactgtccccatcagtgggctgacacttcctgaggggatttggccatggtccccatggccagaggcagctgtaccatgagctaatggggttcagcttcaggccccttccatggccctctatctaattttgcatttttaattttgttttctttttcttaaataggaagcccaaaactgcataaccttcaggtcaccaaagcctgactgcagagatcgtggcagtaaaaccctcccaggtgacactaagattaaagtgacattgctataagacctctgtgaaattctaatggcaagcttctcacctgcacggagaggaggaggactgtgtgtcgggggctatcctggacatcacaaccccacctctacagacttcaaaaatacacatggatagagaagtatgaacaaaattaaattttaaaaaaaggaaaccctagcctcccaacatgtcttgcttctgcccaggatctaaacggttcacaagtatattacatgtgtgtgactcagcccaagtccctgactccagtgctcacgctctcaaggacgacgccccactctctcctgccctttccccacaacgattccctaaagagtcttttctgcacacaaaaaccaccttcgaaagaaccaaaatcacatcaccttccaacaaagaggcataaaacccctcggaggacatatcaaaatactgagcgggggagactggagcgctcatgtttctcaaaagtaggcacaggtttaacagaagctgagaaacaccgaagccttcattctacagaggaggagagcgcggcccaccgcaggtaacaaagggccttattttagaagtatcatctcggccagacacggtggctcacacctgtaatcccaacactttgggagacagaggcgggaggatcacttgaggtcagcagttagagaccagcctggtcaacatgacaaaaccccatctctattaaaaatacaaaaattagccaggagtggtagcacacacccgcagtcccagctactccagaggctgaggcaggagaattgcttgaactcaggaggtggaggaggcagtgagccaagatcacaacactgcactccagcctgggtaacagagcgagactccatctcaaaaaaattaataaataaaaatgatttaaaaataaaaactatcgtctcatctaaaaagcagcataatcagccgggtgtggtggctcacacctgtaatcccagcactttgggaggcggaggcaggcagatcacttgaggtcaggagttggagaccagcctgaccaacatggagaaacccggtctctaataaaaatacaaaaaattagccaggcgtggtggcgcatgcctgtgatcccagctactcaggaggctgaggcaggagaatcgcttgaacccaggagatgggggttgcagtgagccgagatcacgccactgcactccagcctgggcaataagagtaagactccctctcaaaaaaaaaaaaaaaaaaaacacaacctgacctcacacctgtgatctcaacactttgggaggccaagtcgagtggatcgcctgaggtcaggagttcgagaccagcctggccaacatggcaaaaccctttctctactaaaaatacaaaaattagccaggcttggtggcatgcacctataattccagctacttgggaggctgaggcacgggaatcgcttgaacccagggaggaggaggttacagtgaactgagatcacaccactgcactccagcctgggtgacaaagtaagactctttaaaaaaaaaaaaaaaaagacacctgccactgagccagttctggtatctgagactaagctaatacaggtattaaaacagcaaaaatatgtatcttcaacttggtagttcctccatagagctactataaaaccagcaatccaagagatctgaaaacatgtgtccacaccagaaacatgtacaggaatgtacatagcagtattattcctctttttctgagatggagtttcgctctgtcacccaggctggagtacagtggcaggatttcagctcacctcaacctctgcctcccaggttcaagcgattctcatgcctcggcctcccgggtagctgggactacaggcgtgagccaccatgctcggctaatttttgtattttccgtggagatagggttttgccatgttgtccaggctggtctcgaactcatgatctcaggtgatccacccgcctcagcctcccaaagtgctgggattacaggcacaacattattcttgttttttgtttgtttgttgttttgagatggagtctcactctgtcgccaggctggaaagcagtggcgcgatctcggctcactgcaaactccgcctcccaggttcaagggattctactgcctcagcctcccaagtagctgggactacaggcgcccaccaccatgcccagctaatttttgtatttttagtagagagggggtttcaccatgttggccgggatggtctcgatctcttgacctcgtgatctgcccgcctcggcctcccaaagtgctgggattacaggcgtgagccaccatgcctggccaggcacagcattattcttaatagctaaggagtgaaaacaacacaaatgtccatcaactgcctgatacacaaaatgttaaatctatacaatggaatattattcagccacagaaaggaacaaagtgctgatgtaagccacaacatgaataactttagagcactgtgctgaatgaaagaagctaaatacaaaaggccacatgttgtatgattccattaataggaaatgccctgaatatgcaaatctatatatatcgaaagtaaaccggtggccgccaggggctgtcggaggggggaatgaggagtgactgctaatgggtatggagtttctttctggggtgatgaaaatgttctggaatgacaatggtaacacaagtgtgaatatactaaaaattactgaattggccaggcatggtggctcacgcctgtaatcccagtactttgggaggccaaggcgggtggatcacgaggtcaggagttcgagagcagcctggccaacagagtgaaaccccgtctctactaaaaatacaaaaaaaatgtagccgggcatggtggcaggcacctgtaatcccagctactcaggaggctgaggcaggagaatcgcttgaacccaggaggcggagggtgcagtgagccaagatcgtgccattgcactccagcccaggcgacagtgcgagactccgtctcaaaaaaaaaaaaaaaagaaaaatcactgaattgtacactttaaagcagtggattttatggcaggtaatcgaggctcaatgaagctgttatttttgacacactagatttctgaaacatttattgtttacatgtttccggacaactgtttttccctctacactactagtcctccacacaattaaaaaaacgaacaaacacacacaacaaaacctagccagatctttaggacggcaatgttcctgggcctccaacatcatccacccggtgctttgtttcaggttaacaaataaagatgtcataggtagctatgactaccttagaaacacgggacagtcaccagtttaaactggggccgtgagggatggaagggaagtcactcccccatacctttcaactgggccttgcttccagcgttttaattcctctctctatagaaacatttgaagacagacaacgcatcctaacacgggaaaactttcggttaacagacattcacgttgggaaggtctgcaggggtggaggggattggggtgggctgacagggagaagaccacaggccagtagcctgacttcctctccccagggttccctgggataagttggagttgacagcgcgcttatcccagagagcaccgcctgatgccgcccagctagatcgcaggcactttgaatccaggagacaggagggaaagggctaggggagaagtccgggaactcagggcggggaaagcgccgggggcgtgggctgtgctgggccccaggccccagccgcgcgtcccagaccccgcgggctccagtgggcttagccaggcccaggggcggggggctccagcgccgcggacggcccgggaggggaagccaggcggagacagctcggaggcacagaggggaaggggacccccgccgcgagctcgggagagcagagccggcccgggcagcaggtgtgggccgggtcccggacaggtgtccgccgagtcttcagcgggtgtgggacacggccttggacagatgtaagcagagcgccaacaggagcaagggcgcctcgagcaggtgcacgctgaaccccggcccggcagcggacccggacaggtgtggcgggctccgcccggacaggtgagggccgggcgagcccctccgcgggacgcgccgactccacggccagccgcgcagccctccccgcagccggtccgaattgcctgaccgggagcccccccgctttgcacttacacagccggtggccccgggcccggagcgggagcccacgacctggcgggcagcggggccgagcagcctctgcggccacttcccaggctctgggctggcgcttcctactggcggccgagccggcgctgctcctgcgcgtgcgcggaggccaggcctgggcccccgatccgtcccgggttttgcaagagacgcgagggaagcaagggggtaggagcgagggagaaaagaggaaggaggagcgagggagagaagaggggacagggagggaggggacatggggagggaggaggaggagggaggagggagagaaaaaggtggggtgaaagaaggagggaggaggagcgagggagagaagcggggacggggagggaggaggaggagagtaggaggaggaggggtgaaagaaggagggaggggcagcgagagagagaagcgggggacagggagagggtggaggagggaggagggagggaaaaaggaggggtgaaaggagggaggaagaggaggagggaaggagggagatggagggagatggagcgaggagggagggagggaccggagcaagagaacagagactaggaggaaagcttctgcacctggggcggcgcagctggaaggaggcccagttctgtccccgccgcttaccagtccttcagggcgcgcagctcaaatttcacttcctctgtgaagctcaggggtggaggccccgcggaagcccactgtggatccctgcggcaccccctgtgaccctcacggtaccccccgtgactcccacggtcgtgccccccacgtgggtgggtgaccgtggcgcgcgcggcctgggagcgcctccaggatcgcagggcccgggaggcacgtgaggtgcgagccccagcctgggccggcttccccctgtgtggcgcgcggtcttgatccccagctggcaccatggcactcccgactttgagggccccaacaatccatccacataaaaggttccaaagaggcgacaggggctaggacagctgtcgttagttcagtgccaaggcgccaagcttgctaagtgcgggcagaagccatttaaggatttaaacccctctgggttcaaaaataaaataaaataaagcaggagatgggggaggcttacagacttaagatgcccagcacatgaattaacagtggcatccgcagggaaaattgaaaacagagagccgctctccgttatgtatgtttaatgttctgtttgaatcttttaacatgtacatgtatttctttttcaattaaaaaatcctggccaggagaaatggctcacacctgtaatcccaacactttgggagactgaggcgggtggatcacttgaggttaggagttcaagaccagcctggccaacatggtgaaaccccgtctctactaaaaatacaaaattagccagatgtggtggcgcgcgcctgtaatcccagctactcagcaggctgaggcaggagaatcgcttgaacctggaagacagaggtttcagtgagccgagatcatgcgattgcactccagcctgggcaacaactgcaaaactctatctcaaacaacaacaacaacaaacactaaaaagggctgggtgtggtggctcacacctgtaatctcagcacttcgggaagccaaggcgggtggatcacctgaggtcaggagttcaagatcatcctgggcaacatggtgaaactccagtctccactaaaaatacaaaaattagttgagcgtggtggtacatgcctgtaatcccagctactaggcagtctgaggcaggagaatctcttgaacccgggaggcgggggctgcagtaaaccaagatcacaccactgcactccagcctgggtgacagagagagcccatctcaaaaaaaaaaaaaaaaaaaatcctaaaatggaaaagtaaagaggacaggagtggttttctcagcacatacagcagcaagggagaaatggtctgagccagcatttttcctttcagccagcaggcacttacccgctctgggctatgtgaccagggctgttttattatcacatgtgttataaaataagatactatccctcatccctgctcagggctagtggaaaaccaattgagtttttattgaattattttctacagagtcagaatgagttataaataaaacatatcttcagggcaaaacaaatagagctgatttccagcctgccagacagccaggaagttttcaacagaggtgcccaggggctgaggaagagtgtctccctgacaacgcacaagctgcccaacgtggctacctcatggtgttacgaccgcatggaggccgtgcagtggctcacagctgtaatcccagcactttgggaggccgaagcagacggattgcttgagcccaggagtttaagaccagcctgggcaacacagggaaactctgtctcttggaaaaaataccaaaattagctgggcaggat

SEQ ID NO: 634 - DNA, 189204 bp, Homo sapiens
  source 1..189204: mol_type = genomic DNA
aacaaaaggaaccaggtggcatgtgaacatttaaatgtttaataaatatgcatagtctcatctacacttcctcttttctccatagaaaccgactgaaatcatgagtgaaatttcataagcatcatggcctgatgatgcaagactgtatttgaaacaattcttgaatttctgtgcacgagatcatctatagccaaatattattcccatgaagtctcacctctgtttcatacatctttatgggcttctcctcactcctacctggagccagctagtgctctgtcagtgcaaaataactgtttaaatagtatcttaaggaaaataaatagagaaaaggaaataagccgaagggaatgatggaattcattctaaagccaggtattaactcactggtagggaagggcgagcgacgcagtccctcgcctgcgatagccactgaccccactcaggctcgcgcggcccctcttccattcccccaaatcactgccgtcttattcctgcccaaccaccctcgtcaatctctttgaatctgtgatttaaaacaggcattcatggacattcttcttagaaggcctagtgctaagtcgcagttgtcaagggaaccgcgtgtctggagggagaacaggctctccggagtttcccgggaaaccaccccccgcagaggcaggtgcggctggctgggcctcgcggggaagggctctctgggcggagtcggggcactcggggcctggggcgtggtcgccgggctgccgtgcgctcgggatcagtctttttatacatatatatatgtgtgtatatatatatatatatatatacacacatatatatatgttataaaattctaacttcggtggagtactttactttgatattccacttgcaaaacagaaccactgattccttcctgcttgacaagattgagtcgctatcaaggagctgcccgtgctttggaaatggtccaaatcgacgaggaactgccaaggagccccctcagacagtaaggttctgttggccagggtcctggggacagacacgagtgttggtgcgcgcgactgaaacgggagcagagcagttgaatgagcttcttacgctttgcatggtgcgcagaatatcccaccgatacccagaaatccagtagaaatagggacgagtgttgctgcgaaagagccttttgcatttgaaatgcatgttaggttaactggaaaggcgcctgcctcttgttttgtttcagaaatactgttgggaaaaggatccgatttctgctcggagtgaaggaagtggtctctggagaattcctaggtcaaggctggcatttgcaccttttcatggtctttccctgcacagtcacttcagcggcggcgtcgctggggctgaggccgggtgactgcggctaggcatgcggatttagttccccgcctgtcatctttgtggctccttgtgggggaggggcgggcggtctgacacagttattaaacctggcagctgcgctggcggcactgaggagcattttgagtgagcttgcagaaaatgaggggctttcagctggtcgcctgcttgtcacctctcgctgcctgaaaggcagctctcagagccctttcctgtccttctaattacagcggcgggggcagtgcgcgcttcgggacgcaattggaaacgtgagtatctgtgtcccccgcgctgctggcaggcggctaggcgcttaaagcttccagaccggtggcggggacggaaaggcagggataggagaggcgggcgcgcgtgcggcggggctgcgggagggccccgagacgcgcgtcgccacgcctcgtctggaggtggtgcgcgctggcgaggaggcgacagcccggaaggctgcagacgggggcgttgagtgcagggttgccagcgccgggcttggaaccgccctatgctttggggatccacacacaaaggaaataaccttggcctaggcagccagggcaggcagccccgtcccgcccccgatctttccggccctttttgaagatggagagaaggcgcgttttacggttggctcgaaacgagatgaggccagtgttccagcccgtggggacctttgtgcgctgcgcagtggcggctgcggccggtcctgcagggacacgggcgtggcggcgtctcagggagcggcgcgcatcgctgagtccgggccccggagggggcgcgtctgggtttctttgagatctcagcgcctttgggatttcagagccctgcaggcctcagtctctcgccgcgcccagaactcgtttcttccttctcttcgcacaaggggtttaagagggcagacatgaagtgaaaagacctcaattccctcctttctccccaaaatatgagtgtggggggtgtggttttttttccttactatagattgctaaaaggaatcttgaagttcaactcagttttatatttaattccagacaaggttttaattttacagagctggcatcatgcaagggtgtgtgtctctgtcgtttacacatttcttaaagaaactcggcccttccctaaaggttccgaggagcgtttcacagagtcacgtggtttcagaacgtcctgtttaatgtttcaagtgcatttctgtgttgatttggctgaggcccaaatatgtgatacagaggcaggcggacctgaagtctaactactgcagtctctgaggctcaggtttcttgatgtggtgtctggcctccacggtcaggggctgatagccaatggaagacctcaccttccccagaggggcttaccagagccaggaccctgtgttgggagtgtgagcaatgaacagtgaacaactacttaaactttccaggtctccgtttcctcatccatataatgggtgtaacaggataatatcagatatccatcaaagtaatatctaactcctagcctaagagataggctacgatttctgcgtgtcttccatctcccaccaagcagcttttcttttaacctgacattggaggattggcttaatgagagcaagtagaaaagacagaaagactacaaagtggaaaaattaaaatataataatcctcagaaaagtagtaatcagtatagcttagaatttgcctaaaaatacactaaccaattgcttgtacacacatggtgtccatatggacacatatggtctctttaattttatttatcaggttatggccctggggaaagattgatgtctgtctgcctcaaaaataatgcttgacatttggtgcttaaatttgccccaaattggccaggcacagtggctcacgcctgtattcccagcactttgggaggccgaggcaggcggattacctgaggtcaggagttcaagaccagcctggccaaaatggtgaaactccgtctctactgaaaatacaaaaaatagccaggcgtaatggtgggcacctgtaatcccagctactagagaggctgaggcaggggaattgtttgaacccaggaggcagaggttgcagtgagccgagatcacaccattgcactccagcctgggcaacagggtgagactccgtctcaaaaaaaaagaaagaaagaaaaaatgtgtcccaaattttggttttccatctcagagtggggtttctcagatttttgcacatgagtttcttgttaataaaaaccagatgatgattaagtagaagtgttgttaaaagaaataaatgtgattctgaaatattacatatgacatatcaaaactagaaataaatacttctactgaattctactctagtaaaataatggttagggtattgttcttaattttgtccactgtactttaaaaagaatatgcagaaattggagggaaggggttcagaatggggaaatcaaataatgaggtggaaagaggagagactaaaagaaccgaggctgttttagggagagaaggtggagtggcgacttcgttactgtcaaatgtgtgaggggctgagaaggatggagtaagagaaaaccagattttgattggatataatgaaaaacttacaaaatggcgaaaaagtaaaattaaccaccaagaggcgtctagaagtgaacaatttatcatctgccgttcatggccccagcccagccattctttaccctagctgcaggctagaatcacctggggacttaaaaactcctctgaacctggatccttccccagactccaagattctgacttaactggtataagcccaggtatggatatgttctaggagctccctaggcaaaacactaggtagagaaacgttggtccatgcctaagaggacaaagtctaccactgcagggccaggcagggagcatagatatccaaggagggccaggacctgctggggttcacttgctgaggaggcagctgtgagccacactcaatgttctccagatcttctgatttgccaagggaagctggaatttttggtttttacatttgtgaatatgacatctccagatctttagaggttggcaactaattaagggtaaagcattttaaaatgtttcgtgcttgctgaacaaaacaccccagccgaagctggcccctcatccagataggcaactgcaaccagacttttgccttctttgtgggtaacgggtgtgaatgggagctctcccggggcctcttctagcttcagttttatgatttgatgctttctttttaacctgaagaaacatctcttggcctcagtctttttaaaggcatgtcatgtcttcctggccgagtgtctacccctccatagatctctctggattgtttgaataaaggaacgtttctagttccctaatcttaccctggctgtaaattaaggaggctgccccctggagattctgagacagtgagaattctaaccattcttaaccacgcctgccacctcccccacatccgccactcacagctcccttgctccctccactggtgatgtagatggggtgagtggggttcaggaggcctgggaagtgtcctgaagctgcctcctggtgccccatctcttgcaggggaggggaggagtatggattgatcatatatataagcttataagcagcaccattgttgaagtatgattcttacaaatgagactctaaaattcccagttcactcatctcttgaatttccctctagcctctctaagccacacaagccacggagtatagtatgtctccatcaccaaagaggagcaatcgacacctctctgcatagacaagactatcttgaccagaggtacaacaaatccaggcggactagcactgagagttgactggattctccctgcctctcccctgtgggttagggctgttgtactttggatggtggggccaggtggtgaagtaacaggaaggcagatcacctgcctctctagcattccccgcccctgcctgcccaccctgctgtagtgctaagaccagggtgacacctctcttctttcccaatgatgaggcactgacagccttccagggtggcagagagacctgtgtgtgcaaggtggcagagatgtggcgcagaagagatgggcacttactccagtgctgatacacagaagccagctttgttcaaaacagtgttgtttagcaaggttgcactgtatataaattaaatcaacatccttaagcagctgcctgttttcagttcccacaggctaagcaggcaaaaccagagcgactatgagcaggtgtcaggttcccctccaaaggtcacaaaaaaagaaaaaccccaaagccatggccatgctgtctccagtccttttgccagcctcttggttctccaaagtcaaatctttggcttgtggtccaaagatttcactatcaatgagaaggtaaggggagttttgaagttagaatgtgtaaatggcccagggaaaaggaaaggaagtaagatccagctgtttggttggattctggttgtcaaacacagaaatatgtttcttggaggagcagaagccacatcagccccaattttgagttgccaaaaccataggctcgggctgagatgctctaccctggcataatctctctccctctctcttagtgactgcgtaaaaaatgtggttgattcttttcctggaatcatagattagcacattccactgcattaccctctgcccccagctagaccagatcctgaggagcaggggatgaatagtggggtgctctgacacccatttaacagtctcacagtgccttgcttcgagccactaagcagcctcaaagctgtgccccaaaatgggctgcacacaaggttcttcctacgtgctcctttcaggcatgagaccaaccttggggatcagtattcctgtcctcttttccagggcagtggttaaataccatccactgctttgcactggcacctggaatgtcaggctctgactatttctggcttgataatgacaggttccctatggagaattttggcctatgagcttgtcagccagggtttacacagtcagtttgtgttttttcttgaggtagtttacccggttgcctctctattctagagctttcctgttggctctttctttttgacaaattgactacttaacggaagatctacttaagtgtgtccagggacagagagagaaggtaaaaccccagtctattgctttgaaccttgttgtggtggtagcagaaaaatcaacgaaggggaaatttcatactgttggctaaaatgcaactattcaattcatccctgtcctgatcaataattcttattatatgaaattagtaagaatattaggaaagctcaattatgcaatcctatgaactataattggtttgtaaaaacaatttcattggaaattttatttaaagtagattattttgatcattgtatagtggcaaatcaaaaagtaaattctcctcctaaggtatagtgatatgtaatgggcaacaaaaatgcaggaaactttaaatctgttaaataatcactcttgttcctactgagaatgaaaaaaagcaaaggaagcatgtgacaattttaaaacattagctcttgccatcatgtttagaagaaagatttgcacaattaaaaaaaaacagataaaaaataaaacaaagacagtgtcaggtggagtgctagactggctaatcaaatgctgggacaagtggtgcggatagcctgttctacaccaaggctagaagaggggaaactgatattcttggacacaatcaggttatgagtgctggctctagggctttgagcggtgatctagaactggaaaggtaagccgagaaggtggaaatacttttcacctaaaggcaaacagcttgagcagtggctcaaaaggctgcaggagcatggatttggcaactcatttgatatggggagaaagaagacaggctttcttcttggagaccggtggttggggtttgtatttcaaaggtgtgtgaccttgagcaatttgcttaagatgcagtgtctcaattttcttatctgtaaatgaacaactgagccattgcaggttgttctaaggattaaagaaaattgatataaagtgtccggcactgttcattgcatacagatgattagtctgtgatgagtatttttttcaggacaaagacataaaacggaactgtatcttacttcaatatcagaatgaggactttgaacttgttctcaagaccatacgaagccaccctatggtggctttaggaagtgaaagcatttttataccactttacattagaagttcattgagtttttacaaaatcttttttttttttttttttttttgtagagacagtatcttactctgttgttgaggctggagtgcagtgacatgaacataggtcactgctgcttggttctggactcaagtgatcctctcgtgtcaacctcccaagtagctgggaccacaagtgtgcactaccacacccggctaatttttttaaattattttttgaagagacagggtctcgccatattgttcatgctggtcttgaactcctgggctcaagcgatcctccagcttcagcctcccaaagtgctaggattacaggcatgagccacaccagcctaaaaattcttatatgaccatttgaatctctgcttagattttttttcttctctcttgtgcttgtaactcaaactttaatacttgaaaagattcatgaaaatttgaatatacttttctaaatctgtaagaagactgtctcccaagatggtttgtcagtaaaccatgtggtttatggtcagcattgtgttatctccagcctttctgaagagctaacagtagctccgagtttaattatgtaataagctatgcctactatttgatgccacgagaaataaactttgaaaaaattcagtacttgaaaatatttatcaaatacgtaggatcgtctatttccattagtatattattcttgaacattttcccacaacccattatttttagctattttaagtaagagttacaactttgctatgcttttggtttggtgatgagtaatgtttccattgttatatctctattttacaacttccctgaactgtttagtgcaatttttagaatatgagtcagttacaatctttacactgcagttttgaaccatctttttatgaccttctaagcgaaatatttctctgaaaatttcccctgctttccctctcccctttccttaattcccttaagttagtctttgttaagcattataattgagtagagtaagctgtgttatctaacacttttctactgcttttacaagcacaaagatgaatcggagattcaacaaagcttcaaggttctagaaataagcgcttttgagacaggcgagcaaaaatcaccaatctcattagcttctccaaaggaaacaaataagtcttgtgagctactactgggatttttagagttttccaggcctcattttaaagagatggggactcactgtgttgtccaggctgatcttgaactcctggcctcaaggcatcctcccacttcagcctcccaaagtgctgggattataggcatgagccaccatgctggccatctaggcttcaagggatgtttgtttgtttgtttgtttggagacaaggttcccaccctgttgcccaagctggagtacagtaatgtgatcatggctcactgcagcctcaacctctcaggctcaagcgatccttatacttcagcctcccaagtagctgggactataggcatgcaccaccacacctggctaatttttaaaatttatttttttcatagagacaagggtctctgtatgttgcccggggctgatctcaaactcctgggccgaagtgatctgagcctcctgctttagcctcccgaagtgctgcagttacaggcgtgagccaccatgcctggccaggcttcatttttaaaaaggggaggggagggttgggagctagctctctggctcacaaacaataatgacttcaatttctgttctttcaattgatttttatgtttccctgggagggagaggaagactaggcatgctcatcttgccaaagtgattaactcttcattggccagcctctttggacacccatttactgctcattctctagtattctaaggaacaaagattttgttgtactttaaactaaaatagcttgtttgttctaagaacgtaatactaaattttgagatggagactgtatttatacagaaacactttgcaagcaaatgtttataaccagcccctactgcttttacaagcacagagatgaatcaaatatacacaaaagctttgtgctagaaagaacctccatgaattgaacgtacgtgctatatggtaggcatcattcttgtcactgtgcatgcatgatcccattcagccttaacagttatcctatgaaaagttattatcctcgttttagagatgagaaaactgagacttagagagattgagtacatttgcaaagtcgctagctgttaaaaagcaggtgcaggagttggagtcatgtctgtctgaatttaaagccgttgcttttcctgatatactctgcatatgacatgatgcacagcagaatccttgggaatattctgctccccttggagttccctgcttagtgagtgcttcgtgctcaaagaactctcacagacaacgctagtacacttattagttttctttgtatcctttggttctcacaggccaactgctacaaggcaggtccaacaaatttcctagatgactgaatattgggcagtattccaaggtggtcaattatgtctaagactcacacaaaagcattagcaaggattgctccatggatcaagagcaaatcaatgtacaattgtcctctgcagctaacttattagggaacataaagttgcaatatttcactggaaacttccatccactagaaaaaaatgagtgcttaagcaaatatggccagactctgattatgattaagcataaacctccgaaatgaaattcgtgtgtacattctctctgcgtgggaccaatttggccagcttactttaaggaaaagctttctgttgtctgcattcttgccaaatttctaaactttcaagggtaaggactgtagttttaactctttattctggcatttagtcatttagcttactgcttggcatatagtacatcttcaagaaatacttgtttggattgagtgtatcagggttctccagaaaaacagaaccagtgggaaatatatacatatagatatatagatgatatagatatagatgatatggatattgatatatacagagatttattataaggaattggctcatatgattatggagatagacaagtccaatctgtaggatggggcagcatgctagagacccaaggaaagccagagttccaattccaaggccttcagtcagaaagagctgatgcttcagctgaagtccacagaccatctgctggaaagttctctcttacacaggaaagcattcatccttttgttctagtgacacctgcattagttaaataagatccacccacattatggagggcaatcttctttactgatgaaaacgctaatctcaggcaaaaagacccccatagaaatacccagaataatgtttgaccaaatatctgggcactgcatggctcaggcacatagacacataaaattagccattacaatgagtgaatgagtaaataagaaacagtagtttctgaactgtggcagagcaagtggacttcaggcattggcctctgttgtagccttgagttataccacacctcagtaataggaagagctcttctttccagtgaggcagcaccaacagactatagggcttgaacccaagatgccacctgaggggaattctcatgtggccacttgtgtccaagtgatcagttaccactgaattatgtgaattaaagaaacaggttgggacatggaccatgctctccagaactgagggtgaaaagggtgtctttctaagaggtaagattttttggaagtggaatcctatcatgtaagaccctagtttttctaagaatttgtgggaaaaaaataacctttacctgagtgtatgtagccacatttgactgctttgtttagttgatttaatgcaactcagtggttactgtaaatatctgaaacttgtagattattgcttctctaaaattataatgggatccatttctagatttacatcatttttttttctttgagacagggtcttgctctgttgcccaggctggagtgcaggggcgcaatcttggcccactacagcctccaactcctgggctcaggcaatcctcccatctcagcctcctgagtatctgggactacaggcatgagccaccatgcctggctaatttattagttttgtagagatgaggtctcactatgttgtccaggctggtctcaaactcctggcctcaagctatcttcctgcctcagcctcccaaagtgctggaattataggcatgaaccactgcacccaacctagatttacatcttttttttttttttttttttttttgaggcagagtcttgttctgtcacctaggctggagtgcaatggcatgatctcagctcactgcaacctccgcttcccaggtttaagcaattttcctgcctcagcctccggagtagctgggattacaggcgagtgccaccatgcctggctaatttttgtgtgtttagtagagacagggtttcaccaggttggccaggctggtctcgaactcctgacctcaggtgatctgcccgcctcggcctcccagactgttgggattacaggaatgagccaccgtgctcagccgatttacatcttaaaacgtgctgcaaactaaagaagcctaggaaacatatccctgctttgtgatttaagctgtatttttgttattcacatacaaatccattttagactgtaccttttaagacaatgttgtgggaaaacaaaaaaactgttattaatgatattagcattttgctcacttggcttgggactgcacagatttcttactgtggcaagtttttgtttatctaatttagtttatctgtacaattaagctaacttctccccgaaaagaagcagttctcatattctaactttgttttaataactttttacttatataaacacatgtacttattgttttgttttgttttgttttgagacagggtctccctctgtcacccaagctgaagtacagttgtgcagccatagctcactgtaacctttaactcctggcctcaagcaatcttcctaactcagtctcccaaagtgctgggattacatttacaggcatataccaccatgctcagctcacatgcacttaatttttaaaaataagatggtacttttaaaagcttatatctaaatacagcagtctcttttctccttactaaaagaggcttcctccctaaagacagcccctttcaacattcttagccattcttctgctagttgcttccatgtttctaaaaattgtcttctttctgctatttctgttacatttttcattcttttattcaaataagtaatatatttacatagttcaacattcaagaaaaaaaaagataaaaacaatcaaagtctctttcctaccctggtccccagcctcccgaattttcttttggcaggcaaccagtattaccagcctctcccatatccttcctgaaatgtccttggatatacatatactactgattattgataaattttttgtattatctgttgactctcacttatagtagatgagaacttagctttctcttctacactctactttctgtctttcctttcttatgacttacttatagtacaagtcttgattacgtctgtatttatattactaggaccatgtaaatattgtcactgctgagtcaagtagtttactatagttgtgtttcctttcataggctggatttttttttgttttgttttatccagagctaattattacttcatttttttatactagattttctatgggtttattgttagtcttcttcaaatggtccaacagatatgtcacgattattaaagttttttgtttaattcaaaacgttcccgacactttatgggttccacttctccactccctctgggattttcctctcttagttctcaatcccaccccaatttggactggttttatttccgccccaagatgctattgtttggggcttgcttttgtaattcttctacattagattctcttttcctagaaccccatatcttttccttgcttggtttaattctgtttttctgaaataaatcctccagtagtttcttaagaaaggatacattgaaggtaatttttgagccccttgctttttagtttttaaatttttacttattttgagacagggtctcactctgttgcccaggctggagtgtagtggcatgatcatggctcactgcagcctcaacctcctgggctcaagtgatcctcctgcctcagcctcccaagtaactgggactacgaacacatgccaccatgcctggctatttttgtttgtttgtttatagatatggagtctcactgtgttgcccaggctggtctcgaactcccgggctcaagccatcctcccatctaagcctcccaaagtctcaaaatttatttattctaccccgacgcttcttagtttggctagatatagaatcctcaggtaaaaaattatttctcttcagaattttgtaggtgactccatgattctgtaccactctccactatgccctgtgttccttctagtctctaccattgctgctgggtcctccatagccatcctcactctccttttccttccttatgaactattttttcttactgtgtattctcatatttcatggtgacttgccatgatttgaggggtttttctattaattattttgattacttggctcttttaaatatggaaatgtatgcctctcatttatgggaagatgtcttctatttttatctttgctaatcttcttccttttattttctctgttctctcttctggaactccagttggctggaaactgcaccacttagattgatcctctaattttcttatctttaatgccgttgaaatcttttcttttcaaactttcaatttccaagggctcactccttgttcttttttaaaaaaaaatcctgttcttatttcacggatgcaatagcttttttttgctctgaagatactaaatatagtgaatttaaaaaaacttttcttctaccccttgtattgtttctttgtcctttgagttccttttttccatttgtttgtttttgtttatttgtttcagacttcttattttcacaaatgtctagtgatctctgactgtccattcgtatttaagagtgaggttctataacacttgattggagtctttgcgtgattgatgggtttggtaattgggacaagacctttgtagggtgatctggcagtaatctaggtttttctttgggtgatcccaaaaggcagtgctggaaggattttccctccctccctcccttccttccctccctccctcttttcttttccttccttccttccttccttttctctctctctctttctttttttttggagatgaggtctcactccaccacccaggctggagtgcagtggcacaatcatagctcattgcaacctcaccctcaacctgggctcatgtgatcctcctgcatctgcctccctagtaggtgggactacagaggcttatgccaccatgcccagatgtatttttctttaatgggaccatttagtttcttctaagactaagaagcctcctaagaatacttctgctttgggtaaataaaagtgacttccaccattctaggagcatgaaatggaacagaatctggaatgcctaccattcagtatacagattcactttaatctccagctttcagtttggtatgcttccacctcccgggggtctgtctggagacctcagattaaatttctcctcttgaatagaggctgttaatttttcagcattttacttaaccacagggctgtcagggtgtgtgtggtaaaattagccacataatgatctcaagagtatggaccctacagccagaatgtttgagtttaaatcctggctgtggtagttactagttgcatgaccttggtcaagttccctaagccctgcagttggtgactccacactaaaggtgaataccacagtgtccagggaggtaaagaacacatttggattttatttcttttcttcacggtctattagttttgtactgtaagaatgctttcttttataacacataaccaaaccaatgaaagcacaaaggaatacaattgcacacatgatcttgccgcgaagatggtatggtgtttcccactgaagtaattcattgttcacagaatttggcaataagaaaaggaaaaaagtctctaaacaaataacccattgaaaaacataccatgatttgaggatgacgcaatggcaaattgcaacatggaaagaagtcctgaatgaaaattttatattacaaaaagatcaaaaactgtccaacaaaatggcaaagaaacaatgtttattttgaagtcttactcagttttcatgtttgactttactctcgcagtcttaccaagttatttattttcagtttaccaccatacttagaaatagcatgggatctttctcagctcttaattccctttgcccctgggacaagtataaaactatgggggtgcagtgaatcctacaccctccacagtaactggaaggagaaaaacaattgcctggagaaaactgcaggagaaaagagcgcagacttaggtcaaaccttcacaaacagtgcctaatttaaaggacacaggcatgaggttctgtccaccagtggtcctaggcttccaggggttgctgaaagtgatcctgaatccctctgcccagaatttctcttctgcagactttctgacttggaagcacaggaaatggtaaaacacataagtgttggataacatgaaatataaaaacatgtactttatgaggctcatttgccagtttctttgccattaattaattcttggtttatttgtgatttttaaaaatagagaaaatgtagccagctacttataagtaaacattttaaataggaaaaatttacaaaggtgtctgtacaaggatttttttttttgcatttgtttatattcatttacctacattagggaattggttaaataaattgtgctacattcataaaatagcatgctatgcaaccacacacacacaaatgagcatatagaactaaatatttctataaggaaagttatccatgatatattcttggtaagaaggcaaaataaataataaattacataaattgttttgttttaataggcactgttttgataatatgttttcctaggaaaccgtcttgcatgatactaaattgttaagtaatgatttctctgtggtaggatgttatatgaatttttgcaaagagcatttattgctttggaactagagaaaaaagtgaccaaagataggcagtgaccaaaggcaggcactgggaaccacagagttagatgaaaatgatcttaataacaacaaattagataatcatgattgcctgggattaacactgtagagactttaagggaaataactcgaaacatttttttcattttctcaaataaaaccagttgggtgaggaggcaagggagtgtcaaagaagtttttctgaaaaaaaaaaaaaatcaaagaaaatcaattgagtaggcttaaagatataaaatagtgtttcttaaattaggaagtatatttgtatatagcagttggtttaattgcatttttagaagttctctaaggctgggtgtattggcactcacctgtaatcccagcactttgggagggactacttcagcttaggagttcaagaccagcctgagcaatatagcaagaccccgtctctactaatcaatcaatcaatcaatagctgggcatgttggcacatgcctgtagtcccagatactcaggaggctgaggtgggaggatcacttgagcttgagaggccgaggctgcagtgagctgattgtaccactgcactcccacctggatgacagagcgagacttatctcaaaaaaaaaagtctttaaaatacattctcatagtgttgattcttctcagctctaacctagcacttattcaaaattctttaagagtttcatttgattaaaaaatccttccacagtggaggcatcttgttctcttcaagaacttgatacatattgaagagtggagaggctgttacttacgacacacttggggccaatatttcaggcagagtcttgaaagaaactttgctgtgactgacctgcctcagaaaacttagactcccacaccatgctttaatgtacacattgaacctatccagtttgctttatttaacagttccctacgtttgttttctgggagacagcaggcttagttatcagattattccaagataaactgtgtaatatgctcttcttatgatgatctaccttggtatgtgacttttgatttaatttcacttgcctatttgaggtagcatttttttgacctatcatttttctggcatatttcaagttttgtaaatatatacaactgtatgtgtgtgtatattgtatatatgaatgtatatgtatttatatgatgttttactaaaaaacaaaaaaaattaagccatagaatttgtaaagattttaatattgatgaaagctctctgtgattcttcactctaacattgacaaaagaatcaaccttgtgaaatattcctccagacttgcacatagtctataattggaatgtatttgaattttcaagatttccaaatgtctacgtgtggcatctttccatgcctaaatatgggatacgtgaaccatgttcattttcctttatagcacagcacttcgtgtgagtgaggcgcgtgtctctccacaatggccgtctacacaatcaggcacattctaacttcatccgcatctaaagaacagatgtgcacttgtgtggccatccatggaggtattcatggcgcctgcagctgggatgtggatggtacatttcaatccactgcatagcaaaatacatgctgaagtgaatggcctgattgttgaggataacagtgttagcctttttactgaagaagaaggagaaggaggaggaagagggggaaaagggaggtggaggagaaggagaatgaagggtaagagacaagacaaggtttaatcaacctcagttatacagtaactttcattctgattgtaacaaacaagttaatctacattgacaaattagttaccatctctatcaccacttttcagtgaatatgaatatgttcattagaatatgtttttaaactaatcaatataattgtctggtatcccttgaacactaggaatggcatgtttaaccggaccccagcctggtgagcttcaggctgatggtgcagggcattgtggctataaaaggggtggtattgggggtggcggcagggagcagattagttgcaaagcatctgccgcatggttgctttttaaaaaaatcctgcagttatgccacagcaacccccaaacacaagctggttagtaccacacaactgctttttgaatgctgagcacattcacccacaagctaaattgtaggcaagccctggagcttttactcctcttgggaaatttgctggggatgaggtgagcctgggaaacctactcagaggccctgtatatgatgtccagattgaaccctatgccagggagctcagccagggggtaaaaacagctgtccctttgctcatcaagcccttcaccctgttgagggctatgtcagccctgagaaagggacacctttttctaatcacacaaagggctactggtgggctgcccaactagatgtgatgttagctataaccactgacacctgaccagtagacttggcaggcaccaggctaagactattattatcttactttacactcataactaccattagctgctttttataaatgaggaaatggagatctagaaaaagtaagtggctttcccaagatagctttcatagtcccaccttcccttttttagtaaggatgggttgctagccttaggaccgaggctgtgggacagcaggtcccaagagttcgttgaatcagcatatccagcatctgggaagggtcagcgttttccatgcccaggtggccaaatgtaaactactatagatacttatcctgtacatatttgatacttgatcatgtctgatgtagctctgcacccctcacaaatcctaccagcacactttaacacagcaaagtttcactcagtatgaattggggctagacgtggtgactcacacctgtaatcccagcaatctgggaggctgaggcaggcggatcacctgaggttgggagttccagaccagcctgaccaacatggtgaaaccccgtctccactaaaaatacaaaaattagccaggcatggtggcgggtgcctgtaatcccagctacttgggaggctgaggcagaagaatcacttgaacccaggaggcagagtttgcagtgagctgagatcacataatttcactctagcctaggcaacagagcgagactccatctcaaaaacacaaaacaaaacaaaaaaatatatatatatgaattggattggttaatggaaaaaaaagatagtacgtcctggtttaagggcttcagtgacatttaaaatatgtttcttttggaaaattggaaaattacacaaaagtagaaagagcatgaaacctccatgaatccaaattcagtgtcaacagttaccaacattttgccaaccttgtccctccccgcatcccagctttttgccatattttcgttttggggcttttttttttttttcgctaatgtattttaaagcaaatctcagatattttgattcacatgtcactatggataactaacagataagggtttttaaaaagtaaccaccatggaattattatacctaatattaacaataatttttaaatataatgtaatacctagaccatattcaaattgattacctcaaaggtgtctttctgcagttagtttgtggaatcagaatggaaattatgtgcacagtgtatttggttatgtctcttgtattttctctcatagtttcacctccccttttatgatagtaatttttttttttttagaaaccacggcatttattacagtgatttttatttttattttttattttttgagacagagtcttgctctttcacccaggccggagtgcagtggtgctatcttggctcactgcaagctccacctcctgggttcacgccattctcctgcctcagcctcccgagtagctgggactacaggcgcccgccaccgcgcccggctaattttttgtatttttagtagagatggggtttcaccatgttagccaggatggtctcgatctcctgaccccatgatccgcccgccttggcctcccaaagtgctgggattacaggcatgagccactacacccagcctattacagtgatttttaactgactctggaaacacttcctggaagggagttgatgctcagttttcaggagatttgggaattctcggttagatcataattgttcattcagcgcaaatgtgtactgaatgcccactgtgtgcccaccctctgcccaatgccggagatacagtggtatcccagtgccctgtctgctggaaagtgatgagtggccataaaacaggataggaacatagagaataaccaggatcaggggagggaggtggtggctttagagggggtagttcgacaaggactgaagcagtaacattttgagacctcagtaatgaagatctggagagcagtgttccaggcagaaggaacaagagctcaagacagagacagcaaagagctcagtgagttacagccagagaaacaagcacactgcatgaatgtgggaggtagaagggctccttggggccacaaccccagggggttgggaagagaatggattttaacctgggcacagtgcaaaatgattgatgtcatgttatcacccctgatttaaccaggtttcaaaaatttccttaccagctaatggcatggggatgtggctggagtccaaagtgacacccttcggcctgggtttaggtgtctctaatcgccctcacctgcacttgtgccatcgcacactcaaggcttaggggttgaggaaggagtgctggaagggcccagaaggcagagcactggtgtctgcactatcaggttcaaagcccagaaaggccaggcatggagtggctcacgcctgtaatcccaacgctttggggtctggaggattgcttgaggccaagagtttgagaccagcctggccaacatggtgagcccctacctctatttaaattttcttaaattaaaaaatagaccagacacagtggctcacacctgtaatcccagcactttgggaggccgaggggggtggattacgaggtcaggagtttgagaccagcctggcaacatggtaaaaccccatctctactaaaagtacaaacaattagctgggcgtggtggcgggcgcctgtggtcccagctacttgggaggctgaggcaagcagaatcgcttgaacccgggaggcggaggttgcagtgagccgagatcgcgccattgcactccagcctggacgacaagagcaaaactccgtctcaaaataataataataataataaggccggacgtggtggctcacacctgcaatccctgcactttgggaggccaagacgggtggatccctgaggtcaggagttcaagaccagccggaccaacatggaaaaaccccatcactactaaaaatacaaaaatcagccgggtgtggtggcacacgcctgtggtcccagctactcagaaggctgaggcagaagaatcgcttgaacctgggaggcagaggttgcagagccaagatcgtgccactgcagtctatcctgggtgacaaagtgagactgtctcaaaatataagaataataattaataaatacataaaaacaaaaggaaatgcaagcaacacattctcaaggtggccacaggagggacagtagcagaagccccaggcccccgggtgggaatagccctcgtgggtgcctgaagtgcccgatggcagagatgacagcaccgttttcagtggaaacccttgcattgcctatgggttttatttctccttctccttacacttctggggattctaagtcaatggcactgcagtttgaagatgtggcagtgccattgacttagagtcaccagaagtgtaagaacggtggccccccctgaaagtgtggctgatgcattccatttgccaggaaagccagacctttccatcccttccctctttctttcctctcctggtataagatccaggaatcagtcctgagactcagggtgaacagagagagaaggacataagcacctcccaggcctcccagtacccgctgttagtgtgggggcttctctggctcctggtcaggccccctgcccccaccgggtgtgcaaaggagcagggcctttttgcccacagatcagacaggctgccctttcccagggctgcggccaacctgccagcaccaggattcttccagaacagtttcctgagagcagggcggtgatttcagcagcaatatactcaccaattattcatctcactgaatttcattagtttaaaaaattatgtttctctttattataaaggcaggcaattgactactgcctgaagaataaactcagtgacgctagagagagctcggcagtatgtgaataaaaggtcattaacaagcctagttcttgccataaagacaggtgagaggaaaataaactctcaaggatgagtaaatcacatctcctcagccatctttatcaaatacatggcaagattgccactgtatgtgaacagaacacaagtaaccgtttaatggctgcttccattcgggaggcttagatgatccaagttcccacatctttgtcaactggtgcagtttttgttgttgttgttgttttgtttttgttttgttttgtttttttttgagacagagttttgctcctattgcccaggttaaggtgcagtggtgcaatctcggctcgctgcaacctccgccttctgccttccggtttcaagcgattctcctgcctcagcctcccaagtcactggaattacaggcgtctgccacaatgcccagctaattatttttttgtatttttagtagagacagggtttcaccatattggtcaggctggtctcgaactgctgacctcgtgatccacccgcctcggcttcccaacgtgctggcattacaggcctgagccaccgagcccggccccaactggtgcagtttttttccggcgtattgatttccttgggcagttatcggaagtgatgtgcacagccggatattccctatccttgagcaatgcaagaactctcacactgccgtgatggtggccttcaccgagactggactctcagaactggattgggaaacagcggggggagggggtgcatggcagatctaggaaaacacactcaggaagcttccatggacagggcctgggtggagttgaatagcaggaggaaggcggatggtgaatttggaagagtaaggaggtcaaagtggcaataggctacatatgcaacatgatgtctttttaatttggagttttctcctctttctttttacaaaatactctcttaaaaagtgatatctgagacatgacaattaagtatgtgatcctgattggatcctggactggaaaggacattattgggataattggtgaagttggaatatggactatagattaggtaacagtgctgtattgtgaaaattcctgaatttgataactggttatgtgggaactcttaggaaatacacattaaggtatttcagagtaaaggggccgccgagtgctctggtatgcacctgtagtctcatacttaggaggctgaggcgagagaatcagtggggcccaggagtttgaggctatagtgcaccctgatcgtgcgtgtgaatagccattgcactccagcctgggcaacatagtgagactccacctctaaaaaaaaaaacttttttttaagagtaaaggggcacgatatatgcacttcaccctaagatggttaaaatttttatatgtatgtgtgaagagaaagatattaagaatgataaagcatggctaggcacagtggcttccacctataattttggcactttgggaggtggaggcaggcgggttacttgagcccaggagtttgagaccagcctgagcaacacagtgcgacctcatgtctacaaaaaataaaaaattagccaagtgcagtgatgtgcacttgtaattccagctactagggaggctgaggtgggaggattgtttgagtccaaaatgttgaggctgcagtgagctctggttaaactactgcactccagactgggcgacagagtgagatcctgtgtcaaaaaaaaaaaggaatgatacagcaaatgtggcaaaatgttaacaacaggtaaatctaagtcaagagtataccagagttctctgtattattcttgcaaattttctataggtttaaaattatttcccaataagaaaaatttcatgtgctacttattgcttatttttattttatttttgtgacagagtctcactctgttgcccaggctggagtgcagtggcacaatttcggctcaccacaacctccacctcccaggttcaagagattctcgagcctcagcctcccaagtagctgggaccacaggtgtgtgccaccacacctggctaatttttgaatttttagtagagacagggtttcaccatgttggccaggctggtctcgaactcctgacctcaggagatccacccgcctcggcttccctaattgctgtgattacaggtgtgagccaccgcacctagcctacatgctatttattgtattggttaagacttaattcagctgtgacagaaaacccatgaaaatagcttaatcaagagtgaggtttacttctcttcaagtagaaggaatcttccagatgagcagtctagttcataaagtttccaggtctcagctgcatctcttttgttgttggagaatccccagcaactggcttccgcctcaggagctagcatggctaagtaccagccatttcctacattccagctggcaggaagggaaaggcttgaagaaaatggggaagggaacaaaagggctcctgctggctcttgtcataagacgaggttctctgaaagttgtcactcagtattttcacgtacaccccattggcaaaaatatagtctcatgaccacagatagctgcacagcaaccaggaaatgaagtctttattctgggtattcctaggcccacttaaaaaacaggagtctggctgggcgcagtggctcatgcctgtaatcccagcactctgggaggccaaggtgggtggatcaggagtttgagaccagcctggccaacatggtgaaaccccgtctctactaaaaatacaaaaattagccaggcatggtggcacatgcctgtaatcccagctacttgggaggctgaggcaggagaatcacttgaacctaggagacagaggctgcagtgaactgagatcatgccacttcactccagcctgggcaacagagcaagactccttctccaaaaaaaaaaaaatcaggagtcctagaatatggaagaaagggagaatggatggtggctcgctccttccttccttccttccttccttccttccttccttccttccttctttccctcccatcctccctccttccttcctctactttctttctctttctccctttcctctcttccttgatggagtctcgatcttgtcacccaggctgaagtgcagtggggcggtcttggctcactgcaacctccacctccaggactccagtgatccttccacctcagcctaacgagtaggtgggactacaggtgcacaccaccacgcctggctaatttttgtattttttgtagagataggatttcagcagtttgcccagaccactcccaaactcctgggctcaagcaatctgcacacctcggcctcccaaggtgttgggattacagctgtgagccaccgcacctggccatgattagcagtttctatcaaatcaagttctcttcagaagacagtttggctcctggcagcctccataaaatctgggacccaagagccccactgagaggtcaggctggccctgtctcgtaatgcagctcggttagcacaggggctgatgtgcaggctgtaggttccgtaacctcctgccatctcaagcatgcacccccagcgccccaaccccacgccgaactctgtggactgtaggagatccacttgtcgatgaccagttactgtacttgaaggttaatccctcacgtggcttttgtctaagagaacaaacgattaaaaaagaaaacaaaactgaagagaataccttgagtcagaatgaaggctcttgtgccttctggctgcctcctgtgcttatagtgaaacagaagtcacacttattttgcagtttgagagagggtaaaaatgcctgttttgttgaaaagctcactatgctagataataaacagtgtttttggttccttgagatgttggctttaaggcaggggataatacagaatgactcctggtcaaaaaaatttgagactcatgcatcctgtagccttctcttagagattcacaatgcacattaatactttaaaggctctgagaggccctctgttcctgcaacttttctgtaagtttaaaattatttcccaataagaaaaattttatgtgctatttattatattagttaagacttaatgcagctgtcacagaaaacacatgacagtagcttaatcaagagtaaaatttacttctcttcaagtaaaaggaatctgccagaagttttctgaaagttgtcaggtctcaagctccaacactttgggaggccaaggtaggaggatggcttgagctcaggagtttgagactagcctgggcaacaaacacagtgagacctcatctctacaaaaaatttaaaaattagcccaggtatggtggcacttacttgtggtcccagctacttgggagactgaggctggtgaaggtcaaagctgcagtgagtcatgatctcaccactgcactccagccattaattaattgttaattaatatcaaatattaacagtaatttgttaatagcaattttgatattaatacattaattttatttttaaaataaataatgttaagtaaatacctacttaataataaaattaatttattaatattaatacttaaatttatgttaaaataaattttaaagtatttaataaattattttattgatattaaaattaatatttaatgttaaatattattatttgattattaataaaataaaagctctgagaagtcctgcaaaaagatgtctatttaattcacagcctcccagacttatttccccaacttttttcctctgttgccacctacctgcttcactcctgcaagtaggagcctcccttggaaaatgccgtaccaagacacgcttttggatcttgaagcccgcactgcacagactttagcttttattctggagcagggattctgggttctgggtatttcacagaacaggcacttaagtcactgtttacgcataatgacaagatttttttcacgtggctgaatgtgaaagcaaatggaagctgcactctcaaggggggaggtgtattgacacctgagagtttttaaaggggtgtttagaaaatcagcaccttatttgtggcaaggctagactgcagtcactgtgtgtgtgacacttgggccgtcgtggccctactgaggctcacaacgggagcctctatttagatatccagccactgtgttgaagatgcccctccagacggaggacaatctttaatggtgagatttttattgctaaatctatacggttaattggccaagcattggaggcctggagttttcgtctaaaccatgtcaagttatcagaattcagtactcaagtgagttttatgtgagctggtgagaagatgaggacagatattttcaccttccatatgcaacccgcagtgaatgaaatgtatttgctttctcttgggagagtcaagtgataacactgcagcctggcctctgatgctaactaaacgggcagaatgatttgccttcaagaaatcaacagccccattaactctactcattttgggtacatttttcattattttgctgtgtagtaatgtcaggctctcttttgtgatgctcatggcacatttcacatgctgtctcattaatttttacaatactcctaggtgttagtatttttgccaggaaaaacaaggttctcgacagcctggggtcatgcagctaattgggacctgccagagacagagccttgaaccccctggtcctgaggcttagctgtcagggcacacagcctgtgaaaggcacgttttcccagttgccatcttacctacaaatatttttgtttgtttatttgtttgttttttgagacagagtcttgctgcgcaatcttggctcactgcaaactccacctcccgggttcaagtgattctcctgcctcagcctcccaagtagctgggatcacaggcgtgtgccaccacgctcagctaatttttgtattttgggtagagagggtgtttcgccatgttggccaggttggtctcctactcctgagctcaagtgatctgcccgcctcagcctcccgaagtgctgggattacaggcctgagccacagcacctggccacctagaaatatttttaagagtcccttgggaaaagtactaacactcctctgccaactcctgtgggcatcccacagagcactccatccacccatccattcatactataaatatctattaagtgcctgcttgtgccaggcattgtcctgagtgctggggaagcccctgccctcaaagagattgcctatacacttgtcccaagtgtcacaaagagccccagcaggggttggtgagcccaccttgcatatagaaaagtgagaagggctgaggagtgggacctcagggtgggtgtttgtaattccaataataatgataaaaagagagaactctcacaggatgagctggcatgattctaagtacgaacttatgtattctcctaacacctctttgatgtggataccattattgaatccatcttttcagatgatgaaattgaggcccatagcagctccatgacttgtccaggtctcacagaacaggtgggattcagtgcaggcatttagcatttaactgtgctctcctgctctctagaaagcctttcaaaggcaggcaggaaacgaagacagttctggaggccctgtgggccctggtcacagtttcaggagaggggaatggttccaataaacaaggcagcgaccatgtgatggccaggttctgtgtcaggctgagtcaccatttgagcagaatgaaggctcacttgccctccttgccccaggggacaggccagggagacacacagagaccttctaggccatgagaggctcatgaccacacatgctgccacctcccaggctgaagacagctctggcgttcaaccttccctcatgcgccagggatgagatgtatgtatggggcatagggctagacacgctcagagcacaggaggtgggatgtggcagcgatgagtccccagggcccttcttgtctcgtgtggactcatcccagcagccttgtacacctgggctggaggtgggcaggtgaaaggcatcccctctactcaggatcgttgggtgcccgttccctgccttgcccctttcttggcccagctcatgtctccccagatgactcaggagggggctgtgtgccagggcgggtgcctcacaggagtcagaagacagaggttcctaccctgagggcctggcaatggaacactttgcttttagaaatgggtgtgttctagaaaaagacgtgactgggtcctaatgaacagctttactccaccctcaactctgatgctttcttcatattttaagggaacaagatgcatgaggctccccacccatctcagtctaccgagtgcccaagcagcccattttacagatgaggaaactgaggccctcagagagataagatgtggtagaggggaggtgaggaagaagctctttgcttcagaatcagaaccagaaatgaagccagaaggggtaagagcgccaaggaggggcacctcctaaggctgtagccagataccattggatctgcagatgctaggtatttttgttattgtagtgcctggaaatggcaagtgaagagactggggtccaaccaggctccttgatgtaattgcccacaaatgggaccttgggaaaaagagtcctgagaggtgtgtggtgtctcagctgaacaccaccgtagagtccacctgcacagctcacgcccactgaccccacttctcagctctgtgaccttgggcaacatgttgcccgtgactcggtttcctcatttgtaaatagtacacaccccatgggattgttattagggctaagtgagctgattcatataaataaaagctgtgagcacagtgcctgccctgcagcaggaaccactcagtattcaaaccataaacaagagttcatttcagtatttagggtgcacacaaatatggaatggctcattttatgatcttatggatttctcctaaaatctgttaggtgtttcagaataacctaatacttgggttaaattatttaaaatgttacttagattctcccagccccgtcattcccctttttgttccttagtctctaaaagtgcttccctacctgggggctattgcacttgttcctttcccctgtctaagatgctctacccaccttctcaaatgccttttccctgggaccctctatcccaataccccagttattccttcagagccactgtcccaggccgtgaccttatttgtttattgtctaatttcccccgggtgcttgttcactgctgtatcacctagcatagcacttggaacatactaaagatttgatgaatgaaagaatgaataaatgaatgaatgaatgagtggctgaataggaagtgtgggctggtgtgtttagcctcaaagcctgtgatccactgactgaccctgccatagtccacttcctccaaggcctctcatgtcttgccagtgcagagctgcctctctcctctgaacacacagctgtcgtggtctgcaccagcactgggcagtgatgcatgggctgcttctcctccttgtacctgctttgatgatttgacagttgcattatttcacattccccatgataaagcccagtgcccagctgaatgataaatgttccttgaaggcatgtattgtgaagtagaagaaaaagtcctctgctgaggggcggagaacagctgctttaagagagtgacaagggttggagcagcgatgtggagcatgtctgaggctccagctctgagcacaggtgtgggaacctgagcgacacccaaggagtggggcatgattgcccagagggccatagacaaaggaggaagggtgctatgggaccaggttctggagcacagctgaacctgagaagcaagcagataatatccccaggcatggttgtgcagggatgagcagaggctgaaactcatatgagaggacgggctgggttcaagacatcagatcagtgtatctgagtttgtaccagtgtgtaagaagtttggccaaaggaggaggcctggagtgcaggggctttgctaagggttagaaagagcccaggggacccactgaaggaaaagctagaccacactgaacagagattaggatcccttgtaggtgtaagggagacaatctccttgcagacctgtgttccagttctagctcctctacttagtcagtcttaaactgggtaagtgtcttaacttttctgagctttggcttcctcctctgggaaattaaggtaatattgcctacctcatagggattaaatgggaggacaaaggtgaagcatgtagcactacccaagaatgtaatgtctgcagcagtggaaggctaagctgcatggggatgagcttcctgaagggcatgggtgaaccaagggtctttaccttgggcagggattctagctcatgggggagacagggtgtcttagtctgctcgggctgccatagcaaaataccatggactgggtgtcttcaacaacagaaatttattttctcacagttttggaggctggaagtcgaaggtcagggtgtcagtgtggttggttcctgatgagggctcatttcctggcttgcagacagctgtcttctgactatgtgcttacatggcctttccttgatgtgcacacgtggagagagagagaacacatgctctgatggctcttcttataaggacactaattctgtcaaaccagggtccagccttatgacctcgtttaacttaattacttccttagaggcctcatatccaaatacagccacattgggggctagggtttcaatggatgcatttagagttgacacaaacattcggttcataacaagtagggtaaagggtagcttaagtgacaagaagtcctctgagcactctgaacagagccccagtccagtctccccagtgtggcctggcttttcataccagatatgagaatggttgaattcagttttgctcacctggaattgtccttaaagtgatattccactgtgcatattggaaaactcagtcttcagagttcattgggaaatcaccatcaatactgctgcttttatcctgtctttgggaagtggagtagggtctctcagatacgagaaacctcatcagaaggaaagcacatgttctgctgccaccttcatgcctggtgacacatttccatctggagcagccacagaccataccactgagaccataccactgcactccagcctgggtgacagagtgagactctgtctcaaaacaacaacaacgttttccctgtggggaatgccatttcttctttttagagtcaaattgtgtcctattccatttccagataccgttttctaggacaagttccccagacaggaatctcgacattctttcagcagcatcgttccacagtgatttgccctttgtattctttttaacgcattcttcctgtgtatgtattgaatgaattccaaaacaaatgagtgagtgaatgaatgaatgaatgagttgttttcattgtgattgtggttccccaagagcagagtttattctttctttccacacacacaaagaaaccctactggccagtagatcgcccaataagtgttagcttcttacatgacaggctccccgtcagagagctattcactcagttcataaatttggaaatctcaggaatattttgattttcactgcattggcctttttacaccatgtttactcagtttcaaccttacttcaataaagcagaggcttgatcatactctgcacagcctactgcatgtctcggtgtgatgagtggatcttgagccacagcagggactgccaatctgtcattttctgaggaatactccttttttattggctctgatattttcatgtgtgatctcagcagctgtgcctttgtgtttgaaaagagccaggtctcactgaggagctgtgtagccagtagcatttattgagtttctgctttgtccctccacgtaagcagtaggaaccctgggataaattgtgcccatcagggaggagatgcctctatctctggggagcttaggaaggagctggggagacaggacatacacaagagaggttccatgaggagcactgagaaaccagaagatggtttcatgattcctgggggccagttaacctgccagggcttctctctccctgaggaggagtttgataagaaagactgggttcaattagcagctgattaggagacatgaacagagtaaagtgcactttccagacaactattgctgactgctcctgtgggcagggggctgaggaaattgctagaccaggggtgattttgcccccaagggaaaatttggcaatgtctagagacattgttggttctcacaactaaggtgggggaaatgctactggtatcgagtgggtagaggccagggaggctggtacacatcctgcaatgcacagcacagacccccaccacaaagaatcatctgtcccacaacatcagcagtgcccaggctgaaaaacctcatggcagcctgagtgagcgtcggggcgtggtctgagtgctgggaactgggtcacttttcctccttgggtctcagtttacttatctgtgacgtaatgatctcttaggttacattcagccctaacattctgtgatttggtgaagctaactttaactagagattaaaggtgggatgtgaatgtctttagaatatcgtgctttaaaaaaatcagaagaaatatggagggcatttaagagactttctaggaaatagcgcttaacctcaggtaaatacttaaaactttgaaccatttcaccctcttaaggagctgtacaaggagctgaaagggcctcgttctagtgctttgtctctaaggaaggaatttttgttggcgctcaagggacagcccagagcagaatcttctcctcgagttacacaggactaagatgccagccaagggcacctgagggccccttttcaagtcttgtccccactgccaagtccccgaaaggggaagcctttcccacgcctgcaccattattccacctcctctggctgaatttgagccacaccctcacctgatacctgtctctgttcatatcaaaaaaagcctgctcctctagaccttaagaaatgaccagagggagaatatgagaaaaaaaacaagctctacctgtgtggggaagccagcctaaagggagaacagattgtcagaattgccatgctattacatgtactgggactttccagaaaaagcaattgcttccaatagaatccccttgccacaaaatagtaaaggctgtttaatgaactattttaaaaatccaatgttaaaaattcaaatcatccttgtaaagcatgctgtttatgaagagaaaattccacaggaagataaccctgatgaaggatctatcaccaggtcgtacgtatgataattttaaatttcagaatgtttggcaatgttttcatggaagtgtcaggaatttcgttacagtcacaaatcatgtatgtgtaattagaatgctaaaacagcacattttttctatcaatgtaaactggggccccaaaggatgaaaaaaaatttgtagatgcccattactctcatattacaaagcaaggtaagtccaccgtcaaggacttactaaggggccagccggtagctgttttgcaaccctaagcccatttaccgacgtggaggattactctggatctttggaaaggttgtcaatgtgtcagcttctctgacccaccagggccatggcagagggaagaggtgcttccttctcaccaagtgacaagggagagatcaagaggaatactgagagagcttgatgctcatccgcaggttagaggagtgcaggaatggataagagcagagagagaggaagaaggctgcgttgagagccactgctgtaccccagctgttggggcaagaatgcagtttttcagtaggccaaccagacctctcctgagggtccagtgaggagcctgtcacagagcctcgcccaggtgggctgcatggaggagtgactgggccctgacaaaggggaagtctgtgtgaggtagacccctggatgatccggcactgaggttcagtgacaggcagaaaaatggcggccgcatcataggtgtttcaatgggggattcacagcagagccatctccaaggccccacacaagctttcctggagacaaatgccagcttcagacgtccgccaagtcctgagtgcacaacgtcctattatatctggtcctattatataacccaaagactatgactattttttcctaagtccccttcataggccaactctgggaggacctcacaggctacaggaggaggaagtagaatctagaagaaagagaaagaagcagccaagctttcccatatctgcccttcaggttcctaggacgaaagcacagaagctctaaatcataagaagctggagttgttattctaacactggaaggaacatttttaaagtgtacagaatacttgtaagagcgagggccaggcgcggtggctcacgcctgtaatcctaacaccttgggagtcttcagtgggtggattgcttgaaccctggagtttgagaccagcctgggcaacatggtgaaacgccttctctacaaaaaatacagaagttagtggggcatggtggcgcacacctgtagtcccagctactcaggaggctgaggtgggaggatcatctgagctcgagaggtagaggctgcagtgagctgagaccataccactgcactttagcctaggtaacaaagtgagactctgtctcaaaacaacaaaaaccccataaaaaaacaaaagcaaaaaactgatggctcctcagtcagtctattagccttgttcttccctggggttccctgagggatataaacccatgccccaaggcacccatttctgaattcactcctctcttttgcagttagaatggttctctgagcatccttggaagggatgaggggctggcacagtggctcatgcctataatcccagtgctttgggaggctgaggtgagaggatcacttgaggccaggagtttgagaccggcctttccctgaaaacaaaaaaaaaaaaaggaaggatgaggaaacagtcatccaaatcattttctgtcctgtcctgtgttcacataaagaatcttgttttacattaaaacattttaccttcagaagaagtttaattttatttctcaaactgtacattttatacccagaaaatccaaagtctttcataacctggcccctgcttaccactccccatactcccttcatttgtggataatcatttacatctccatggctttgcacaggccatttctttctttaaaaaaaaaaacaattaattttatcaaatagagatggggctgttgtccagactgttctcgaactcctgggctcaagcaactctcccacctcagcctcccaaaatgctataatcacaggcatgagtcaccgcaccggcctggagaggccgtttctaactagaatgctgttggcttcttgtacttcagtaaagaataaaatgaagactgagagaccaatgattgagagatgaggggaaaagtttcactgccaagcaggaaatctaatccaaaacagagtctagtttccctggtggatgagattcaagggagaggaaatggggtaggtctttaaaagccaaaacgtattgaactgtctctatcctattttaggagagcaaagtcttggcatgttctaattggtgactgatatctgggcttgttgattaggaaaccacagagctggctgaaggtgacctgctgtggtcgcatctggatcacggtgtgtacttgtctgtgatgtggctgtgaggcactagaatggggattatggtgtctgggaaattctcctgcctaatatcccctgtccactattccaccctacacgccagctcgactgagggaggccccttcctctgtgctgctgtaactctcaggctcatgcctccctgtgacggcactcaccctgtgtcttgtttaatcattgattaatccttgtgtgtccagcacccagaacaatgtctggaacactgtagccacctgcggtttatttaatgaatcagtaacaatagcatatgcaaattgaagatttatcatttctattgtttcctctaaagtatacacaacagacatttctttagaagtgacatttcaagattcaaaagaatgtagttttgaattgaagtggggtgtagagaatgatggtatgaggcaatatgaatatcttggtaggggttcaacttatcctaactagtgatttaaattaatatttatgtagatttgatttaaatcaaatccatcttggaagggagaaatgtttataacagatgggcatataatagaaccctgtaataaaatctaagtttaaagctcagcaaattcctttcggcttgcagatggagttgggaaaaacagttgacattggtgagttacagttagtttctcaggaaagctagtgattcaagaatgaagggtgtttttctgctagaaaggaagtactgtagagaagatgaattctgtatccaaagacatgtaagagaagatgtgggaatgacagcaggaaaaagaggctgtaccttaaacaatagccagatggaaacaaacagaatagcagatagtggtgggtatgacttgatttttagtgccattcattacagtaagtaacatttactgagcacctacattgtgcctggcactgtgctaagtgcattttatgatttatctctgtattcttcacaggacttaggggaggatgctaatattatcaccagtttacatatgaagaagttgaggcttaaagatttttttttaaagcagcccaaaatctcaaagcatataagttatggggcccgactccagaatctactgttaaccatcttttcatgacaagaaatagaaacaaaactcaaactaactcagaaaaaagatggatgtcattgggaggaatactagggcatctgacaagactcagagatgcatttggacattagggacagctgcaaccagggtctggaatgctattcttttctttttttattttgtattttttgagatggagtctcactctgttgcccaggctagaatgcagtggcacgatttcagctcactgcaacctctgcctcctggtttcacgcaattctcctgcctcagcaccccgggtagctggggttacaagtggccgccatcatgcccagccaatttttgtattttagtagagacagggttttaccatgttggccaggctggtctcgaactcctgaccccaagcgatccaccacctcagcttcccaaagtgctgggattacaggcgtgagccaccgcgcccagcctggaatgctattctttttctctgtctcttatttctccttctctatgccttttagctttattctcttcttctgaagcttagcttttttcacttggcaggaatacagatgattaaagctggtgacctcctatcttatggagtcaagcagcaggaaggattggttcttttcccttagttttagttcaaaaagtccaatgatgggcttagtttgagttggggcctcccttgttttccccaacccctcttttccagatcagtcatctatggctaaacagtctgagaaaaattattggcttagcttggattaatcatgagcaagatcatatagcacaaacacggccttgggggccatccctgtgtcccggacaatcctggagaaagagataacactttaaattgaacatccatccccgagtggatgcttaaaaatgcaataatgaggaacacaggttactttaaacgtaaaatatttaagtgagaaatgcatagctgtataactgagttgtatggggattccccagaaatcagacagtctgtgctttcagaaaatgtacccagattttttgttcttaggcacaattctggagaggcattctaagctattgtttggtacttcttatttattttttaaacagtagatttccttcatgatgatatagttctgaaaataagtgagcctgatgacaaggttgaaaggatttttgttttcataagcttcttcatttcagtaatttcagagactgggagtcacacagtctgcaatgtttaacaagccttcctatagtatatagaagctccttttcataaacatccctaaagtcatcgtgccgcaagttaagcctgttttctttgagtttgttctcagaagaaatgggtatgagcatagaagcttcccttcatcaaaccacgtagttgcatcctcagttcctagcatgtcccctctgggtttattgtccagtcagcccttttattatctcagttactctctgtgaatctcctctgccatctccacgtacccctttttgttgccaagcccagatctaattggtcagtcttttagtgaaaccccagagcaacaaagacaattcctcaccccacacccttccccaggcatcccgcaccacagtgattgtttaagcacagggccacaggccaacttgttgcatttgaattccactataaccagcattgtatctgtattctaaaaagtgtcaagtctctacattacaatcaaagcatcaatctctaaacagtgggggagaaaatgtacctcaaggttaagagaatctaggctgggagtggtggctcacacctctaatcccaacactttgggaggccaaggcaggtggatcacttgacctcaggagtttgagaccagcctgggaaacatggcaaaaccccatctctacaaaaaatacaaaaattagctgggcatagtggtgggcgccagtagtcccagttactcaggagactgaggtgggaggaccacctgagcctggaaggtcaagtttacggtgagccatgatcatgccattgcatcccagccagagtgacagagaccctatctcaaaaaaaaaaaaaaaaaaagaaagttaaaagagtctaacagcaagtagaacaaatggaattaatgatgacagttcgatatattgtgcccatcacagtcagcagatccaaaacagccactaagcactagatccaggagtccccgggcctttgcacccactgttccaaacactaccaaggatgctgttttcccagacagcccatggcacacttgatgggcccatccagatcttctcacagaaagtgtttctcagtgaggctttccttgaccatcctatttaaaactgtgactttctggttcagaccagcccacccaagtccaccatcagttgttcccaatcctcttttaaagctgttttatttttcctggcagcacttactggacatggtctatagttttagttgtctatctgtaattgtctgtctaccctagtagaatgtaacttctgtatgttttgttcactgctttattcctcatctcttaggagcatgcctgcctaccacagagggacccttagtgaataatcttttttttttttttttttttttgaggcagagtctcactctgtcgcccaggctggaatgaagtgtcgcgatctcagctccctgcaagctctgcctcccaggttcatgacattctcctgcctcagcctcctgagtagctgggactacaggtgcctgccaccacgccaggctaattttttgtatttttagtagagacagggtttcactgtgttagttaggatggtctcgatctcctgacctcgtgatccgcccgccttgtcctcccaaagtgctgggattacaggcatgagccaccgcgcctggcccatgaataatctttaagtgaagaaatctatgaatgcaagtagaattctttgtggtgaggaagagcacttgaacatttttatttatttattttatggagaatgtatataatgcttgctatatgctaaacactgttctaaatgattgacaactatatctcatttaatcctcacaacaatcatgtggggtaggactattatcttccccattttgtggataaggaaacataggcgcagtcatgaatcacagtgggcgtgtggcctattctgagtctgctctcaaacactaccatgctgcctttattaattaaataactgaaatatagcagaaacacaaaattggacagatttgggctggggcgagccacggagagctttctgggcaaggtgaattgagcacagatgctgcagaggaggcagtgaatcaaatccaagtgtgggagagacgaactgggagactcagaagtggcaaaagaaatggagagaaggatgtgcaggtgagaacagggatgcggggcccccaggatatacagagagaagcacaggcactaggagagactgactgagaagcctggacaaactgaatgaggcgtccactgatggcccccagggacccttcactacggcctggaattcaggagccagcatccagccagtggcttacgcaaaacaagggttggggaagcaagtgtgggcatgagcctaagtatatgtaatttaagagtgagatggggaaagagtgaagaaggaaagagagaggaaacacagattctcagaaatttgcattcataatctctcatctctcccctaatcttagattatcaaatatattcatcgattaaaacttctttaagaagtgagtggataaaccaattgtggtatgtgcatataaagaaacactgcttagaaataaagagaatgaacaacattttggtttctttcattccacttaatcaaaatgaaatcattttcattccacttaatcattttggttgatgcaacaacatggatcaacctcaaaatgattaagtggaatgaaagaaaccaaacaaaaagtataatctgtatgattccctttacataaaattttaggcaatgcaaaccaattgatagtgacagaaaacgggtcagtggatgcttggggatggagctgggggatgcaggaaggactggaagggagggattacaaaggggtccaaggaagtttttggggtgataagtatattcctatcttcattgtggtgatggtttcacaggtgttcactagtgtcaaaatgcatccaaatttacactgttttcccaaggtttttaagttgggaactctcatcttctcctaagatttgataaataatttcttgtcttctaggttttcttcttaagttggagatgaggggtggtggttaaaaactcctgcttagcttattttccctttagggattgattacacttatttctgtctcccttgcctgtgtgagaaaacctctccagccctggagcaacttcttggggcttctaagtggattgaattctggtccccagaagatatgtctacgtagaaccacaaaatgtgaccttatttagaataaaggtctttgccagaccttatttagcataagagtctttgccattgtaattaaggtaaggatgtcaagataaaaatcatcctggattagggtgggccttaaatccaatggtgattgtcctcatgagagatagaaaaggacagagacaccatagagggaaggccatgtgaagacagagacagagacgggagttcctgcaagccaaggaacactaagaattgctggcagctaggcacggtggctgaggcctgtaatcccagcactttgggaggctgaggcaggtggattacttgagcccaggagagcagcctgggaaaactggcaaaaccccatctctacaaaaaatacaaacattagctgggtgtggtggcatgtgcctgtggtggtcccagctactcaggaggctgatgtgggaggatcatctgagcataggaggttgaggttgcagtgagctgagatcgcaccactacgctccagcctgggagaaaaagtgagacccagtctcaaaagaaaaaaagaaaaagaaagaattgctggcagccaccaaagctaggagagaggcggattctccttcagagcctccagcaggagccctacatttgtgttgttttaagctcatagtaatatgttatggcagctcaggaaatcaggccactaggtacttttgttgctactgtccttagttctaccactgtattttgtttccgctgtttgttcttcattctctgaactaatcctgttagaattttattctcttagtatttcaccatttctacctagctgaacatgttcattaacttcttttttttattattttttgagatggattcttgctttgtcgcccaggctggagtgcagtggggcaatttcagctcactgcaacctccgcctccaagattcaagcaattctgatgcctgtctcccaagtagcagggattactggcgtgcaccattatgcctggctaatttttgtgcttttagtaaagacgggggtttgccatgtaggccaggctagtcttgaacacctggcctcaagtgatacacctgtctcagcctcttaaaatgctgggattacaggcgtgagccactgtgcctggccagaaaagggaaactttgagaagttaatgaacattggccgggcagggtggctcacacctgtaatcccagcacgtcgggaggctgagcagaaggatggcttgagcccaggagtttgagaccagcttgggcaacatggcaagaccccattcctaccacccccccccacacacacacacacacaaactgggtgcagtggtgcatgcctgtagttccaggtactcaggaagttgaggcgggaggattgcttgagcccaggaggtcaaggctgcagtgagctatgatcacaccactgtactccagcctgtgggacagggcaagaccctgtctcttaaaaaatcataaaaataaaaaagtaaacaaagtttccatttccttgtctgcagaatgagcgtgagttcctatgcctggggttggttgtgaggattcaatgaatccatacatggaaatgctttagaacagtacccagcacgtaacaaatgctgtattcatgtcattaccgttattactaggtactgctcacactttccaaggggtggctctctggtagcttcttcaaaattaatggtacattttcttccatcagggttattgatgaaatgttgcattagtcttggatcttgggtgatggtgtgagaaagtctttgcatgggtcctgggattaattctgaactaggttttcagcaaatccccttatgatctctcccaacaaacggaaaacctcagtggtgttaaaactagtcatggtttacctcaatggttggagatgagcaaagggctcccaggccattgcttggtccaccatcgaagccaatttactgttctttgttccacagcttcagcctaactttaggcatccttttccatgtgtgggccattggtcatatgcagaccgagcaaaaaaatgtaggaggcttatagaaaacccattggcatgtttggaaagacagaagtccacactgtgttgatgtgtggttagcagcatcttcttcactgtctgactacatatgaaactgactttaggccttgccaccactttctttctcaaagaaatatgaagaaattatgtagaataataaatatggagcttccaggtagtaagtttaatggaatgagtttagaacttttcacctccttaatgggttgtgagttaacctaagagtattttttatccataatttgcaatgcactgaggaacaggtaagcaaaacaaaatcaaaagcttcatcaaagccaagaaagattgcagctttcattccttctatttgcaaagcccttcaatgtcactgaaggctaagtgtctagctcccctctttatcaagccatgctgcctgtgcatctgctatggactcgatgtttgtgtcctcccttaatccatcactgaaatcccagcccccaaggtgatggtcttaggaggtggggcgtttgggaggtgattagctcatgagtgcagaatcctcatgaatgggattagtgctcttataaaagagaccaagtggctcatgcctgtaaccccagcactatgggaggccgaggcgggtggattacctgaggtcaggagttcgagaccagcctggccaatatggagaaaccccatctctcctaaaaatacaaaaagttagccaggtgtggtgacgggcgcctgtaatcccagctactcaggaggctgaggcaggagaattgcttgaacccagaaggcagaggttctagtgagccaagattgcaccactgtactccagcctgggcaacaagagcgaaactccgtctcaaaaaaaattaataaataaatgagagacccgagagctcttttgccccttctaccttgtgagggcggcaaaaagacagctgcctcttaatgagaaaacaggccctcaccaatgtggaatctgccagcactttaatcttggacttccagcctccagaactgtaagacataaattccggttgcttataagccacccagcttatggcattttgttataacagcccaaatagactaagacaatattctttttattattttaaaaaagaaattaaaggattctaaaacacataatttaagcttagagatttgtgatttccagaatcatctgagacttaggaggtctgagcatttgatatggtttggctgtgaccccacccaaatctcaacttgaattgtatctcccagaattcccgcatgttgtgggagggacccacagggaggtaattgaatcatggaggttggtctttactgtgctattctcatgatagtgaataagtctcatgagatctcatgggtttatcaggcgtttctgcttttgcttccccctcattctctcttgctgccaccatgtaagatatgcccttcaccctccaccatgattacgagacctccccagccatgtggaactgtaagtcaaattaaatttccttttcttcccagtctcgggtatgtctttatcagcagcgtaaaaacggactagtacaccattcatctatgtattatccaaagggcctctgttgtgacttcacccagttccattcaccatatttatatggtctcttgacatgagaatatagttttatgtgtatatcatttttttaaaaatcagaaagcaatttaatgttttcccctggtaaagtgttttgtatgttggcaaatcagggacttgataatgagtgcagtactggatattgagctaagtcagttaattgggctttggctctttagaagggtttggtgaagctctgcttatgggtaattgaggcttcaggttgccaagagttgggtgactaagaggtagctgttttggatcaagggtaaaattttaattagatgatgagcattctcaaagggcatgtagcaattttctgaactgcataatctaatggttcgaaatttagaaagtagtgatgtcatctctccatcttttcaaagaacacacatctgcctctgtaatcattttgtttattatttttaataacagcaataggccaatgctaagtaatatgatgatcaggaaagaaataggccccggggatatgtgaaacagctttgtcagacagtttcagctctacagaattgtgttttcttgatgaaatttctggcaaagtcttctttccatgttttcaaagtctcctcttcctcctcgttgtcagttcatttcctgtttcaaccttccaaggggtttacctatgttaaaatgaactgagttcaaatatagtccttcccagataaaaacttgtgactttctcttttcttgattgattttaatgaaatatatgctgaaagaagtaggaaactcactgagaatgtcaaacataatctgcaggtcattatatacccagagtttacagagggtaggaatgatatctattagtactataacgaatctgtttgcttgcagagtggctttctgacttgctgccagcctgtgcctattccacacttacactttttgacatttaaaatgcttcttaataaatcttagtcagttattattattattattttcatttgcattggaaaacagcattcttccttaccttccatagaaagggtgcaagcaggtctactggcacccacctgcctcacagtgcctggagcttaatagatgctgagtgatgcacaaatataatggatgaattcatttaataaatcctctttttatttatttattgtttatttttatcatattttttaagacacagggtcttgctctgttgcccaggctgaagtgtagtggtaccatcataggtcattgaagcctaaaattcctgttctcaagtgatcctcccgcctcagcctctggagtagctgggactacaggcaggcaccaccatggccagctaatttttttttttttttttttgagatggagtctcactctgtcgcccaggctggagtgcagtggtatgatcttggctcactgtaatctccgcctcctgggttcaagcgattctcctgcctcagcctcctgagtagctgggattacaggcaccgccaccacgcccacctactttttgaatttttagtaaagacagggtttctccatgttggccaggttggtctcgaactccttacctcaagtgatcggcctcccaaagtgctgggattacaggcgtgagccactgtgctcagccggccagctaatttttaaaattgttttagaaaagggagtctccctgtgttgcccataatcatacaatatgcaaccttttgtgtctggcttctttcacttagcataatgttttagggattcatctttgttgtagaacttcatttctttttatggctgaaaaatattccactgtatataaccacaatgtgtttatccattcatcttttgatggacatttgggctgtttccatcctttagctattgtgaatagtgctgctatgaatatgggatgtacacgtatttgtttgagcccccgttttcaattgttttgggtatctatccagaagtagaattgcttgctcatatggtaattctatgtttagctttttgaagaactgtagagctgtttcccacagcagctgaaccattttacattccaccagcaatgtaccagggttcttgtttctccacatcctcctcaacacttgttttcttcctttttagtaagaaaaaaaaatatatatatatatatatatatatatggctatcctagtaggtgtaaagtggcacctcattgtggttttttttctttttttttttccttattattgttattattttttaatagagaccgggtctcaccatgttccccaggctaatctctaactcctgggctcaagtgatcctcctgccttagcctcccaaattcctgggattacaggtatgagccaccacgcctggtctcatttggttttttgggttttttttcttctgagacatagtcttgctccgttgcccaggctggagtgcagtggcatgatgtcagctcactgcaacctccacctcctgggttcaagcaattctccttcctcaacctaccgagtagctgggattacaggcatgcaccaccacgcctggctaatttttgtatttttagtagagacagaattttgccatgttggccagactggtctcgaacttttgacctcagatgatccacccaactcggcctcccaaagtgctgggattacaggcgtgagccaccgtgcccagcctcattgtgtttttgatttgcacttccctaatgactaatgttgagcatcttttcatgtgtttgttggacatttatgtattattcttagagaaatatctatttaagacctttgcccatctttaggttgggttgtttgtctttttattgttgaattgcaggagttttaaaaatatatcctggatactagaaccttatcagatatattatttgcaaatattttctcccattctataggttgtcttttcactttcttgataatgtcttttgaagcacaaaaggttttaattttggttatgtgctgtggtttctgagcactagggaggcccaagcaggaagatagcttgaggatgggaggtaaaagctgcagtgagctatgaagctatgatctggccactgcactccagcctgggtgacagagtaggactttgtctctaaagaaagaaaaaaagaaagaaaaaatttaaaattttaacgaagtccaatttatcgatttttttcttttggctgctcatggtgtcctgaagctttttaaaatgacaggatcctaacacttgtgaaggctatgtcacgggcgtgtcctcaaccttggaaaaataaactttctaggttaattgagagctgtctcagattttctgggttcacacaccttagaagaaaactagattatttcaggaaggtaacctgtaccttaaagtcaaaattgtgaaagtatggatgtaacagctcttttgaaataattagaaggatacaagggccagaaggagcctcatacatcatttagaaaaggttctggaggaattttactttaatacaaattaaacaccagtggcagaatcataaacattttcaaactaatatagattagaaaggatggcatttggggattattatttttataatcagaagggcttgagaaaaagtttgcggaaaataaatacgtttcaacatttttctctgataattcattttgacaactactgtgttcattttgataactactatatcactttataaatgatgaaactatttcaaatgtaatgactgtacttttcacagtttgtatgcctataatttatgcaatgccacacaatcaaccaaacaactcttaactttatttttacttcagtgtattatttagaaatgatataaggaggccagccgcgttggctcgtgcctgtaatcccagcactttgggaggccaaggcgggcagatcacgaggtcaggagatccagccatcctggctgaaacccaactctactaaaaaataaataaataaataaataaaattagccgggcatggcggcatgcgcctgtagtcccagctactcgggagtctgaggcaggagaatggcctgaacccgagaggcggagcttgcagtgagccgagatcacgccactgcactccagcctgggtgacagagcgagactctgtctcaaaaaaaaaaaaaaaaagaaatcatataaggaaaaaaagccctacagtttactttctggttcttggttattatcaaagggcattggaaggttaagctgctgtaatagctttaaaaggggaatttaaggccgggcgcggtggctcacacctgtaatcccagcactttgggaggccgaggtgggcagatcacgaggtcaagagactgagaccagcctggccaacatgatgaaaccctgtctctactaaaaatacaaaaattagctggtcgtggtggtgcgcatctgtagtcccagctactcaggagcctgaggcacaagaatcacttgaacctgggaggtggaggttgcagtgagccaagattgtgccactgcactcaagcctggtgacagagcgagactccatctcaaaaaaaaaaaaaaaaaaaaaaaagtggaatttagttaagtttgggagacagaaagaagccacggctctcctgccttcttccaaatatactgaacttctgatatgtttgatcaaatgaaatgctcatggtctggcatgattataggtgcaagcctgtaatcccagctactagggaggctgaggcaggaggatgacctgagcccaggagtttgaggctacagtgcacaatgattgtgcctgtgaatagccactgcactccaccttgggtgatatagtgagacccacatctctacacacacacacacacacacacacacacacacacacacgaagaagaacataaacacatcaaatgtgagccattttgctgacttgggcatacaataaatccatatctctgggttctaaagatgtaccaatcttgcagtgagctgagatcacactactgcactccagcctggtcaacacagcaagactctgtctcaaaaaaaaaaaaaaaaatagtagaccaggcgcagtggcacactcctgtaatcccagcactttgggaggccaaggcgggcggatcacttgaagccaggagttcaagacccacctggccaacatggcgaaaccccgtctctactaaaaatacaaaaattcaccaggtgtggtggtgcattcctgtaattccagctactcaggaggctgaggcaggagaatcacttgaacccaggaggctacggttgcagtgagccaagattgtgccactgcactccggcctgggcaacagagcgagactccatctcaataaataaataaataaataaataaataaaataaagatgtgccaatcaaacaagtgtttgctctgtagatgaggtgagtgctcctgatcagatagtatattcaataaaataagcatgtcatcaaactaactttcttggcctttgttctttggttgaaaaactcccgttgacctcatgaataccacatttattaaccccggaagacaacagatagctaatgcaacataaatatctgtggctttaaaaatacatattattatgtgtgcagtctacaaacactttcctgaaattggtcttctgtgggcagtgatttaaacttttcaacttggacgcttttcctactgggggctgtaaagatgataactcagcccttactcttcagtgtttctcattcccgtctcccctacttcggaatgaaacacaatatcttaagcaaacagagcccaaagaggctgatcattggctctcattgtcccctgatactgtagccccgcccctttggcttgtgctgactagctgtttatattttagtaagggccaccctttaactcggcagcttgatgactataatgggcccagttgtctgcgggctgcggggagctaagtccccagattggaggaggctggctctggtcttcgatgcacaggagtggccgttatggaacgcaggtaaggacgcttctcaatgtgggataattctttttctgggccagctggttaatccggggctgggagaaacaagttgtgattgggttgctactttttcctggttttaattttttccctgcagaagagggaaggaaaagactgggatttgctgacaaagctcacagtgagctctgttaatccaggcaggaagggagtaaggaagcaaaaaatcgagggagagacacagctggatttgacaccaaagcaacatgaatgtggcaaagcataaggccagttccagtgatgttgtgagactcaaatgctgttttatttcctaacataggtagtcacagtcaggagcttagctgggcctctccggggtttctgtaagccagctgctagccgatgtaactcagtcgaccccatttgaaaggacctaatatctgctagtattttcaaagggcaaactgtagtagtcttgcatgttataaataggtctattcagaaatgtgggaacagtttagagcagacaggagactgtaaagttttactgccccataaaagtgctcaaagggtactatgtccctctgccgtgcgactgtggaatgaagaaatagccccaggtgaatagagcgtttgtccttgactacccaagtgagaagtcagcagagcctggggacgccatgtgagtcgggggtgaagcctgatgtgggctcagccagccacacctcggggtgcttgctggtttccggggtgtgaatgggtgagggtggaaaaccactcaggcaccggtctttggtgcctgctttatctcttggctggcccattcggtgctcagtgaggcacctgtcgtagctcacggggtgcgcaaagggcaaggaaagggttgtgctgtcattgcgacctgtaaggtggggagggggctacaacatctcgagtcctgggagttgctttagaaagtcctcctcctcctgctgaaaaaaagaatcacctacggcagctttgatcagataagtttctggtgagccccgtggtgtggagtcagtgaacttgcggtttgtgtttgttatcgacaggagcctgataaaatgaaaaggtgaggtttaatttttacataaagctagaggtgaaccatgggactttaatacatttaatgctttgaaagtctccccacctctccaaattccctcaacttgtatctattatctaggtacaccttgtttaaagccaccatgctgtttgcggatcctggaggtattaagtcagaatacaaagggtgtttttcaaatgaatttgacgccaagcaacatgaatgcttgaacccattgtatgaaaacaggcagtctctaagtgaggccaggttctcctggtgcggtcctagagccctggagagggatgagtcaccccacgaggaggtcctgacaaggaatggaaattctgactctgccagtgaacttttgactctcccaggtggggtggaggctccaaagggaaaggacaggtgtgcatcattcaccctccaggcccaccgcaggcctcacaaatcccatttggtcaggtcaatgcattctcaccttcccacctaagtaggtgtcccacagtttaactcaattctgacactaactgcagtgagtgcagaccctgaggtttaagggctcagtcctaccaggctgccccgacctcagaggccagttgcaggctgaaggttgtcacttgtgcttctgactagctggctatccatgagaagttctcacgatccttcctcaggtagattacaagctgtgtaactttgtctaactttgtgctgtaagtcagagattgacttcttggggtcactgttttgttagcatagctcacggaactcagggagacacttaattccatttaccagtttattataaagggtattacaaaggatacagttgaatgaatacatacagccaggtgaagagatggctagggagggtcttggagctttcatgtcctctccgggcgccactctcccagcgtctccatgtgttcagctatccagaagccctccagacccgctcctttgggtttttatggaggcctcattacaaaggcatgattgatcaaaccattggccatcggtgattgagtcaacctcctgcccctctttgctccctggaaacagggtcagggggtgtgtatgggtggagtagggagaaaggggctgaaagttccaactctctaatcacttgcttggttcccctggcaaccagccccctccagaggcaatctgggagccctcagtcgtcaatcatctcattagcatacaaaaaggctctttatcactttgtacattccaaggggttttctttctttcttttttaaatttgagacagggtcttgctccgtcacccaggctggagtgcagtggcatgatcatggctcactgcagccttgaccccttgggctcaagcgatcctccagatcctcccgcctcagcctaccaaagtgctgggattacaggtgcatgcccccatgcccagccaattgcaaggattttaagaactatgtgccaggaagcagagacaagaccaaatatatatttcttattataaatcacaatatcacaccttcctcatgattcacacttcaggtcacttactcactgtgtaactctgtgcaagttccctaacctctctgtgccccagttcccttatctgtaaaattcgctaaattccaggaagggccagccacactggtaggcctatgcggtgcggtggccgatgggggacagacgacacacagaggcagaagccaaagaacacgggtttaaaaacaaggggttaagagcaagagctttgattcagacgaacctggagtccagcctcactttcgttgttttacttatatgttattgggcaagttaccaaatctccctaagtctgtattccttcagccaaataatgggatgacaatctgtttcactggatgattgtgaggtttaaatgtggtcatgcatcaaagttccttatacagcactcagtgcacagcaaatattcagtgaatattaattattttattatgactgctaccagcatctaacgacagtcctaaataccatctaagtttaccaaatgtctctctgatttactggtgacattggataaaggaaatgctaagagaatgcagtgcagtggaaagaagggcgggctggacatcagcgttctggtctccatccgggactggccagcaggtggctctggaaaagggagtccctcagggtcacggttttctatctgtcctgaggcatgatcttcaaagtccattctagcttctgtctatgactttagatctgacagaaatctccccggaggaactcatgagccgtaagttaaacatggtttgaaatcacccttgagctccttgctgatcatgcttatccatgttgaaggctcatccaggaataatagatgggtcttgtgtgtggtttgaaaagttcacttctggccaggtgcagtggtgaaccctgtaatgccagcactttgggaggccaaggtggaaggatcgcttgaggccaaaagttcaagaccagcctgggcaacatagttagactttgtctctaaaaaataaaaataaaaattagctgggcatggtggtacacacctgtggtctcagctactcaggaggctgaggcggtaggatcacttgagcctgggaggtggaagctgcagtgagctatgattgtgccagtccactccagcctgggcaagaccttgtctcaaaaggaaagtacactttttattttcacaggaggtaatgatacattcaagttggttactttacacaagaagaaatttgtgtaatttcttacacaaagaaattacacaattttagataaatttatctttatctaaaattataataaataattttattatttaataaacaataaataaatctaaaactcatttatgtaaaatttgtcactatctaaaattttcatagtaaattgtatggaaaatataatatcccgtagatgtgtcaagaccagaacataggtcaaacagagctgaactcgagtctcaggtctgctggttgactgctagtgaccttgggcaagtcacttaccctctccagttcttgttttcctcacctgaaaatgggaacgatattgtctgccttatcgggctatgatgagaatggaaagctagaacatgtagactgccctccatagtgcttggcatggggtcgttccttttccctcccagatggaacactgcatccatcccgatggaggtttctagatgatgctccagaggattccaagcagagaacatttacaatttccatacattacaaaagtgtgagcctgcaaggcaaggtctggagctgggagcacatctggagcagtgggtgggtactgagaaccatatccacacacacaaagaaatgtgttcgttcagaagatccagcatcaattccttcttcctaagatttgacaagactggagtcatttcttcaccaggcccattttatgaaaaaccctgggaaaactgaggtccagcagccaaagatctaacacagcggaatcaggaaaaatggtggacaggcccctgaaggcacgtaaggagcagggagcctggtgaccttggtgcacccaatgcctccctaactagagtaatggaacaccaatgtggtttacattcataatcccttgcatttgagaatttttaaatctacttaaattttcaaacaagggacactcacaccacctcccacacttattagcatgctgttttatcactccgatatgttcaagggacccacccccataaaagatggaagatgaatcagaaaactcaactggaattgcactccctagaggggccctgggagttgtttagatatgcatagtctcacctcaaggcacatgctgggtacaagatcccttatcacacctccagtcctgctcagctttttaagggagcatttcctgatatataggtctttaactaccaggtgtatttgcccactgtccacctgtgccttcaagtaccgtacttaacaagttggaaccgagggaatggtacacttcacattttgcaactgttatgcaaatagaacttcaatgaaattcctcaaactgttgactctagaaaccgtgggagacaaagggtcagtgtctgacttcacgaacgttaccaacttgaaaaatgagatctattccttagtgtgtgggaggaagacatttaaatctgtagtaccctcaaagcctcactctaaacctggtctggcacttttcaatgtgtgttctttgatatggtaagtagttaagtatatcccaccagagaccttccaaggatgggttttttcctccatatgacttctctcactctttgcaggagaataaaatagagtttcaactgaactttaaagctgtaacctgatctcagaatcatgcaccataaacagcatttgtgcttttcaagatactttcaaatccatatagttttccaagatattcctagttgccacattgggtgatttaattttttttttttttttttttttttgagatggagtctcactctgttgcccaggctggagagcagtggcgagatctcggctcactgcaactttcacctcccaggttcaagcgattcttctgcctcagcctcccaagtagctgggattacagacacctgctaccacgcatggctaatttttgtatttttaggagagacagggttttgccacattggccaggccggtctcaaactcctgacctcaggtgatctgcctgccttgacctcccaaagtaatgggatttcgggtgtgatccaccgtgcctgggctgggtgacttaattttaaatgtagggacatcaagcaaaatgttgctgaggagtctctttcgcagcaaaagtcctgtgaaatctgcaaggccatctttttcatgggtccccaaatgtttcacaggcaactgggcaataattgcatttccaggaatgccaaatggagccaaatccttttaatagctcactgacatgcaggttattccactggggaccaaaaggaaggaactagagctctcaaaatatttgattcttgatttgtgctcttcactggatgattctattttcttgagagcatttttaacgaaacagcagcaatcagtgatttcttagaaatgtggcccctttaaatacacttcagtgaggctagctcttgtgtttcctggacactctgtgtgttctggacatactggaggcacagcataaatattaatgctggccattacaaaaagaaaatgaaaagaccccataaggcagcagtgaccctagaagccccagaagccgtgttggaactgtgacaaggaaggatagtgacaagatctgaaaaaagcagccctcttcccacactcaacacatgcagtaaacccagacatgcagggcaccattgtctgagctgtcactggagggctgggaggagacaggggatggggcaatggcagcctacccacccctcctcatcactgtccaggggcattcaggaaacacaggcttccaatatgaggctgcctttttttctcacaagccatgctcactaggaatccatagcggccatctgcacaccgacctggtggtgtctcaagcttccaggtgtggttttgggggcagggtccttgaggaagggggtgctgctgacagtgaggtaacctgaggtcagctctggacagggctgggtggaagaagagtgtagtgactgctgatccctgtcctttctaggaattggggttactgggtcagagaaacatctcaataccttccaggcttccaaggctggttgtaaacctgctccttgataaaagaaactacatccaacctttaggagcaaggtggggtaacatgggagcagatcttagttcatttgtttgtttgtttttgcttgcctgcttgcttttttgttttttctttttctttttttttttttttttgagacagggttgcacactgttgcccaggttggagtgcagtggtgcaatcatggctcactgcagccttcacctcccagacaggtgattctcccaccttagcctcccaagtacctgggactacaggcatgcaccaccatgcctggctaattattttttatttttttgtagatatgggattttaccatgttgcctgggctagtctctgaactcctgggcccaaatactctgcccacctgggcctcccaaagtgcgggattacaggcatgaaccacctcacccagcctacaaattcttatatgacaatttgaatctctgcttggatttgttttatcctctcttgtgcttgtaactcaaactttaatacttgaaaagtttcatcaaaatttaaatatacttttctaaatctgtgagaaggctgtctcccaagatggtttgttactgcacatcttttccccggtagatggaaatatcccttctctattctctttcccttagtctttcaaaaactcagtgaggaggaagtgcttgcttctagcttctggcggtaggctacatttcccagcctgtcagaatggcctctctgcaggcttcaacccttatgagaaataaagctgtcctttagcaaagtcatcaagctaagtgtctgtcaacagatgatgattaaagtgtggtacatatacaccatggaatactactcagccataaaaagaatgaaatcatgcctttggcagcagcatggatgaacctggaggccattatcctaagtgaaatgagtcagaaacagaaagccaaaaactgcatgttctcagttataagtgggaggtacacagtgggtatatgtggacatagagagtggaataataggcattggaggctccaaaaggtgggaagatggaaggggataaaggatgaaatattgcctattggatataatgtacattactcagatgatgagtacactaaaagcccagacttcaccattacgcaatatttccatgtaagaaagctgcactcgtggtggtgtatgcctgtggtcccagctattcaggaggctgaggagagagaattgcttgagcctgagagttcgaggcagtgagctgtgattgcaccactgcagtccagcctgggcaacgaagtgagactctgtctctaggaaaaaaagaaaaagaaagaaaaagaaaagaggtggatgcagactggagatttaggaaagccttttcagctcctttctcttgccaagtcttgtttgtggctttggtgggtggttttgtttgggggcctgtcttctttattcccttttcttttttctcttaatcaaagcagtctgttctggtactgcagtgaaacaactctttccagttcctttgcatggtggttgtgcacgtagcctccaggcctgggcttgcatcagtcattttgtctattcatacaaagggaaatttaggctttgttcagttcatctcctaccagggcatgtactttcacagctactgcctgggaagctttgtgtgcatgagatatcaccagtctgccaggctaccaacttgactgtaagtggagagactaactgatgaagcaatgactgtgtgccaggaactgttctaagtgctttatgtgtatgagccagtcagcccactattactgttcttctccattttcaggtgaggaaactgaggctcagattgttgagaaaattgtcccaagccgcacagctggtcaggggcaggccagcattcagtttccagagcctgtgtttttaaccattatgtgatgcctccagggtacattatattcttttgcatgaatgtgcaaaaatatgtcttcatgcttctatttctgttcatttaacttgtttcaatttttttctatcacaaataatacagcaatgaatgtttttgcaataatagcttataatgatagttaacatttgtcgaatcgctaacaaagtgatgggctctgtttcaagttctttatgcatcttaattaatttaatctttgtagcaatcccactattattttttacttatttatttattttttgagacagagtctcgctctgtcgcccaggctggagtgcagtggcacgattttggctcactgcaacctctgcctcccgagttcaagcaattctcctgcctcagccttccaagtagctgggattacaggtgcatgccaccatggctggctgacttttgtatttttagtagagacgggtttcaccatgttagccagctggtcttgaactcctgacctcaggtgatccacccgcctcggcctcccaaagtgctgggattacaggtgtgaaccactgtgcctggcaaatcctactattattactatttaacgaatttaatctttgtaacaaacctactattattaccatttaacagaagagggaaacgaggcacaggacagttggctacatattttgttccagattgcacaattagaaagtggcagcttagcaccataagacatagtgaggaaaaaagaaaaaaaaaaagtggatgggctggcattgaaacccagagctggtactcttatgatagtgtctagacaatatctgtgaccacacctctgattgtacctcaagaagaaagatttttaaagtgaaattactagagcataagatataaacatttaaaaggtttttgatacatcttacaaaagtgcttttcaataacactgattgatcatgctcatttgcatttccatgagcactgtgtaattgatcaaggactctaaaagttagataagccactgataaatggagatgcccctctaagtccctgggcagtaaaacctgaccagcatagcctccaataacctgcatagtgttgaggagagcttggatttaagagattaagagggtcaaactcttttctgtccattttaaaatgcaagttttatttaagaggaactatctaatatgctgaagacagtatcaggtatctgtaaaattgctttttgtaactcagaatcttggaacaaaagaaacaataaagaaaatttggaaccagaactgtttaccctacggaaaatttttgtccaaagcagcctctcagcgttccacatcattttcatcattatgaataacgacaacagcaactaaggtttatgttgcacttttgactgaacacatgcctctttcgtatttcttagaccaagccagtgtttcttgtactttcctgatgataagaagtaccaagaggtgttgttagctagatcgtcataaataatcaggcctcccctaggtaagttctgatttaggaggtctgggttggagccttaaatctgtgttttgacaagcatactaggtgttttttattttctgaggattttggaaactactagaaaacacaataaaattgctgtagtaggttcttttttcaatgttaagctattaacattagaatgcttgcttttaattggaatcaggtgttaaagagaaaatctacaacgatcagtcattgcaacagaagtaacaattatatactagcctcacttagcattcttcacccacactggttccctaaatgtacatttcttaattctcttgaatgtctattatacaggcagatgcaacttgcaaatcacactaactcgaacatacacttcagtgcctcactagaacccctaactgacatctttttcctaagtcagtatacctggcatatgcctggctaaagtgccactttctcttgtttagaccctgaagctgatgtagactgggaactgattactgagatctagacatacctcctcctctcctccacataggcccacccaccaagaatccctacattggaaacccttggggttcaaggatcatgagtctggggcatgcaccctgggatcactgttcagagctgaaaatgcatttccccatggaaacattgatgttgatgtggtgccgttttgctagagtccaagtacattttctggtttttgtgggctgatctgggctcttgctgccatttatcatatttctataaaaaaaaaagctcaaaactacattagggaggggtgcatctggagtgtttgaaatatcccaattcttgttctggatggtgtttttaccctgttactatccctttgtgatattccgttgagctgttgccttaggatttgtgcacttctctgtttttgaattatatttattaaaaatttcaacatatgggggtttgcaagaaaaaaggtttcttaaataaaacccctccatatggaatatagccttttggaaattaaaaacaggcattgaaatctatgattaatataaagaataagaaaataaatcaattatcattttttttcacactgtggatagaagatttcaaaagaaaccctttcatggttccttttatttgttttttcatctgtaatttgagaattaaacattcagtcacactagtcccaagcaatacagttcaaaaaacttttttgcctgtttttatttttttgttgttggtttatgcaaatgaggtttttagctggaaacttcaaaagcctgacacatattaaaaataagcagatttatgatgagtgggatttttggcaagcaattgagaaaaatcaccaagactccaaagagagttgttctctttctgtcttggctttgtcatgtgctctttcttaatatttggtttgaagcagtgtatggttctgtaatgtgacctggagcctctattgagtaagcatccctggagactaagaaacatctttctatgctaatggattagtcaaagaagatcaatgtatcatcatttcaagaaaatattacaagaaagtatgctcttactctaatggaagccagtagcaattttcttgtcaatttcccagctattttttaatattattttagtacttactttcctgtgctgactctatgttcaatctaaaattaattgtttgtcccagttcacttccttagtccctagactccagttgcaactttcatgatattctgttcctctcctgcagagggtttaaagggctgcagaataagagggcagcttgtacattcttttgacaaaaggaggcatgtctctcaatgcttcccttagtttctatccccagaagttctcaagatgaatgtccaagtccatttgtgctactataacaaaatgcctgaggctggcgaatttatagacaatagaaatttatttttagttctggaggctggaaagttcaagagcaaggcaccaggaggtttggtgtctgctgagggctgctctctgattccaaggtggtgccgtgagcgtctttacattgtgaaggggatggaaggacaaaagggcttgctagttccctcaagtccttttataaaggcattaatccgttcatgaaaggggagccctcatgatctaaacacttcctaaaggcaccaacctcttaatactatcacattggcagttaagtttcaacatacaaagttggaggcacacattcaggccacagcaatgagattctgtgagttctttgatttagatgaactttgtttagatgaacttttatttctccccaacatcttaccatgagcacagtcaatacaactgaaaattaagctttgattttcctttcaaagtggctctttttttctgctcatgtttctgttaaatgacatgattttattttttaatttgtaaaatgttttggggtttctgctaattgaattatgggaccctagacataaagaagacataaactccccacggagtatacagggtaataagcagatgaggtatctgtacatgtacagataacccaagtacccaggaggctggaagtgctgtcactgaaatacaaagtatatgggattcagagaaagaggtcattctcatccatgggtaccagttgaaattcgtcaggaacaggcaagatttggacaggggaagatgaagaaaaggccaccccagactcagcaggaacagacacttcaaaggcaagaaagtgcaggtcagttgaaactgagggagtcagtgcaagaattgctgtgaagtttaattttacagcataggaggaagttaagttctaaaaccagcacttaaaaaagagagtcatagtgactcagtgatgcttgacaatctgaacatactgcctctcagtaattctcacaccaccaagatgtccttccagtgttgcaacaaatcatgatttctttgattgatcaccagatgaagcagttggctatgtttagaggctatgttggagagcagggagagacagagaataaggataagaatttatttttagaaagtaaatcacacttaccatggcaggatgttcacacagtcatagccacaggggaaccaagattgagaaaatttcagattttctccaagttctccaaagaaaaatgtacaaagatcatgaataggcaatttaaaggaaatagtaatggttaatgatcatatgtaaaatgttcaacatcaccaatgatcccataaatctaaatttcagaaggaagttattattttcttcctatcatttgcaaatatttaaaaataacactgctggtgaatatgtgtatcttaatttcatgcattgctaatgagaatgtaaattggtaccacctttgtaaaaagcagttgcgtacaagaaaaaatagagactataaatggtaatataatttattcacctattcaattgtaaatatttattaagcatattgtatgtctggcaatggatttatctgtaggcagtggatctgtaaatgatttctattttatgtcttgctctgtcacccaggctggagtgcagtggtgcaatcacagctcactgcagccttttgctcctgggctcaagcaatctacccacctcagcctcccaagtagcagggactacaggcatgcaccaccacactcagctaattattttattctttttgtagagacagggtctctctacgttgcccagggtggcctcccattcttgagctcaagtgatcctcccaccttggtctcccaaagtgctgggattcaggtgtgagccactgtgcccgatctattttattctttatacttttatgggttttccaaattttctagaatatttaattgcctcttatcaaaaacatgcattttaatacatcctttccatcttttaggtcccaagtcaagtctacaagtctaccctttccgtatagtatttcctgggctttaggaagtgctctctcatttttctgtgacccttccaaatgagtcttttcatatatggtcttgagttgtagccacttgtatgtatgactttcttcccaactagtaagggagttactgaagagtaaggattgtggtgtagaaattgtaaatttttaggcaaaagactagttctccttccctaccttctccaggaagccttttctactactcaaagaagaaaaaaaaggtgattacttcttccctgaattctcaaaacagttttttatgcctctattatggagagtaaaacaccccgctttgctttggattacagatgattgtccttgtcctgaccccccccattctgctttggattatagttaattgtgtttatcttaaccatagcacccattagtcatccaactccttactataggaaacgaatctcatatctctgtgtgcccagggtagtgttttacataaggtgtgtgctcagtaaacattggttgatcttatgacagaatgaaactggctctttccagctatttcaaagaggtgcatttcagttagtctggaatccaaagtttcagagtgccatgcaagaagcagacccaactgttgaggagtggcagtcataaagcccgatccgccagaaaaaaacctaccaggaaatgaattcaccttagacttctgatccctcaaataatactacttagtgcctttatgggtcctgagaactttatctgtgaagccctaccttctttgaccatctcacaaacttctaaaaattattttgcaaaagaattccaccttttcattcctaaattgaacaccacagatttgccctgaaacccagtttcaggccctcatcttccacatgtggccattgagagaaaagtttaaaatcaaggactgcataaatattattttagaattttaaaaatgggcctagaacggtagcttacgcctgtaactcaacactttaggaggccaagatgggtggatcacttgagctcaggagttcaagaccagcctgggaaacaaagtaagaccctgtctccctgaaaaatataaaaattagccaagtgaggtggcacatgcctctggtcccagctactcggcaggctgaggtgggaggatggcttgagcttgggaggcagaggttgcagtgagccgaggttgtgccactgcaccctagcttcggtgacagagtcagatcctgtctcgaaaaaataaaaataaataaaatgagtaaaataaaataaaatgaaggaaatagagcacaagattcatttccatttaatacacatttattgtaatccaggattttgcaaagccctgtcctgggcactaaggatgatccagagattaaataggacgttgatctcataagatcccatgtggctatggcaatgtaattgaggaaagggaggaacagtgtaaaaggagttaagagacggggagttcattgcccttgactgcagggttttgagccagaattgggttagaagtgggaaataaataggaaggccactggtaactgctcataattgtgttggtggtgactgctgatgctttgagtctgtgcccagtaaatataagacgtaggtgggattcagatagaatgagaaaagctttaggaaaaaaaaaatcaaagttctaaggcaatattggatagaagatatgatgagagacaggttgttatagaaaaggatggcatttaacaggacacagtgcatctgtgagtgttcttagcttctgacaacagactaactctagttagtctgaaagtaaaagaaatgtattaaagactattaggacaccatcaagaaagtgaaaggacagcccgtagaataagaacaaatattttcaaagcacacatctgataaggaactcacatccagaatgtgagaactcaacaataaaagacaagtttaaaaggacaatttaaaatgggcaaatagtgttggttttgcaacaatgtaaatgtactgttcacagtatatatacattttgatgtaacaaatagtaagttttgttatatatatttaaccctaattttaaaaataaatttttttaaatgggcaaacatttcagtaggcatttctacaaggaagatacccaaatggtcaacaagcacatgaaaagatacttaacattatttgtcattagggaaatgcaaagcaaaaccataatgaaataccacttcacacccaccaagaaattgaaaccctcatacattacttgtggtagtgtaaaatggtgtaactgctttggaaaacagtctggcagttcctcaaaatgttaaacatagaattagcgtatgacccagtgatttcactcctaggtaaatacccaagagaaatgaaaatatatgtcaactcaaaaacttgcattcaaatgttcatagcagcattatttatactagccaccagtggaaacgatccaaatgtctatcaaatgttaaacagataagcaaaatgtggtgtatttatataatataacattctttggcaataaaaagtcatgaagtactgacacatgctacgtggattcctgagtaaactgaaaaaattttgctgagtgaaagaagccagacacaaaagcccacacatattatatgatttcatttatatgaaatgtccaagtgtggcggtgtgcctataatcccaattactggggaggctgagatgtgaagatcgcttgagcccaggaagtcaaggctgcagtgagccatgtttgtgacactgcactccagtctggacaacagaacgagaccctgtctcaaaacaaacaaacaaaaaaaccaaacaaatgcagcctcctctgggaggcctttcttcgtttcctgcttctatgttcctataaccctctgtccatacacttctatcatttcatagtgttttgaaattgtaggtcgtccctccccaccttcccctctgccccccaaagaagataaggcccttgaaagtagactcatgctttttcaagctttgtattctcagccttgtgacagatgaaggaagggaggaaggtaaggaaggaaggatggagggaggaaggaaggaaggaaagaagaaaagaaggaaggaaagagtgaggaagggagggagggaggaaataaggaaggaaggaaagaagaaaaggaaggaaagagcgaggaaggaagggagggagggaggaaatgaaggaaggaaggaaagcgcgaggaaagaagagagagaggaaggaagggaaggaggaaggaaggaaggagggaggaaggaagggagggagggagagggagaaaaggaacgaaagagtgaggaaggaaggaaagagggaggaagggaggaaggaaggaagggagagaggaaggaaggaaagaaggaaggaaagagcaaggaaggaaggaaagagcgaggaagggagggaggaaggaaggaaggaaagaaagagagagagaggaagggtccctactccaacttcttttacggagtaaaaaggcctaaagagacagtcatgacttatcatttgcaggactgattgtatcatacttgactcatttgttaacattcacttgaaggaaacgcagagattttttttcttcgctcacattcaggagctgtgcttgcttataatgaactgtcatgatggaggccggcccgtttcagctctctcagccccgtcaagctgaactcacttcccctgaaaggacagtgtttgcatttgtgtttacgggactggggaagaggatgcgttttcaggagacctgaaaaccgagccaacccccttttcctgccccgctgtgctgcgattggcccatcttggaggctggctgcaggagcctttagtcatcgcacagggaaatctttctggaaccgggcaccaacttgcgtgtttgttttcatgctctttgtgcggggattagctgtcgtgccgggcctgaaaatgctgcgagcgccgggcgacatctaatccaggatttgcctctgcctcgcggttgatggaaaacagatgtcttactgctctgggcctgagcacagaatggaaatgaccgaccagagagccatttggagccgaggacacccggtgaaagccattcagagtccagccaggaggccgactttcctcctctggtctgtttttactacttgagccgctcgctcagaaaacggccttagataaagcagtttcaccttcagatcgcctgaggctgcagaagggcggctgcgggggaggaaggaggaggcggagaggagcgggtgcgaagtcctgggtcgcctgcccgctgcctgatgtcgtgagctagggcacctcggccctggctgggcgcgcagcgaggcccaggcccgaggggtgaggcccaggccactccggagcgcgcgctgttcccgcgaagcgagtcgccgtctcgtagtaagtcgtggctcgggctgtgccctgggaaccctcccgcccgggcaaggtccggtggccggagcgtgcgggaagcctgcccagagtccatttccggacgggcgctgcggggctggcagccggcctggagcgggtgcagtgggtcggcgcggcgcagagctgtcagcaacagggccgctgagcagcagaacctggacgccgcgcggctcccaggccctgcccgcggagctctcccgggagtcgcggacctctgccgtcctcagtcacccgcgtcatgcaggatagctttcaaagtcattttgcagagaaaaaaagatactgagcaatctgaaagcaggactgtagtaattttgaaaagatcggcttcctctttttctttaaaaacatgtttggtcattttcctaaaactactttccttcctttagcctcctcttttattctttgccccagctcgtactacagttcgggcttattagagcagggagatggtgacttttgagggtttgcagggctctttctggttggtgtatgtattctgaaaatacttgcccggtgttgaaagctgcatgccgctgacaaagtagataaaaagctgggagtgtggaggacggttcgtctcactaaatgcctgtcagatccaaagcattctgtgaaccccaaattcgttccgacctgtaatccaaccccatggagcaactgatgccttccaccaggcccctttgctttcccgggaaatcaccagctttaatttatggaacagagacagctttagattcaaagacttttaaagagttaattttagagcacttagaattccagccatccaaagattaggctagccccttagggtgtgaggggttgttcttgcagcagtatgcacatctatgccttttttcattgttttcttctaaaaatggagattaaattttacatcaatatttttagaatgtagttaagagttgttgcctgacaacttgtattgagggttcctttcccagggggtgggaggaggtattgtgctgggtccactgcttcccagctccacgtgacctttcctctcaaatttccacttgatttcatctttggcagaactggtacctgcccttcagctccaagaaacaaaagagcaggggtgagtcagaaggctttgactacctcacccttaactagagatagaaagtacttgattaaattctttgtgatacacattgcatttccttccctttccaacttaggttcatataacaatgaaggatcaattaaaatgaactccacctcccttctcccttagggtaaatatggattcccttagggctgagttgggcagggccatctacactaatgaaaagtcttctaggtgaggtaatctggcctgttctgggctaggtacagaacaccacatcccatttgccctcattaactcattcttttaactcattcttttcctggcagcctcccttttctttctatccttttctgtataatcccatttagctacccaccataactctactttggatcatggaatctaggataccatcactgacaaggtttgtttagatgactgtctcttatcagtattccctgagaacatttttccaattcctgcctttattttcctggaaaattctatgtcgattaaatcctccactagaaattccattgtatctgtcaaaaataagcatcacactcacatcttgaatatttttcttgcatcatcattttaatgctgacttgcacagcttcctgatttctacttcaaatttaaatacaaatggaaggaagttgttataagacactaaatataaatgggttagatagtctcagtgagaattaacatcttattctctgaccttttctttagtctgtccttgggttgaattctatcctttcaatttctgaccattgactactctagaaagaggttggatagttattttgtgtgtcaggaatgatctgtttacttggccttttctgagcagcagttactcactacctctcctagtgctgattggtaagaatttggcctattcaatgatgataactcaacggggtaatatagcaaggccctaggaagctttgaaaatgacatcttgaagccctgaaatcctggtgcaataacattatcagaactttctccttctttcaccactccatgaaaaatgacactgcttggtttatatcaaatatgtcttagattataaattcccaaagacagctttagcttgatttgtacaggtactaaaagtttatgctggcgggtcagcacctggcaaatgcttttgatgctgctactaatgatgaagacaggaacaatgatggttttcctttttggtttcttgagaaaagacttcctgcttagaatgtctgtttgagaggctattctgtgaatgttatcttaaaaggcttgaggcaaaggctggcataatatcatacttagtcccaacattatttcttatacttttacattttagaccttcagcctgacctgttagttggcatgtctgaaaaagtccacctatgagtttaatttagtattttctctggaagaaaatgacaggtcttttgaaatgggtagtatttggtttaagggttaaaagaattggcaagtgcaacctttgagataaataggtagagaggaaattaaggggagtgaatttcatgaccttgagccactatttactagacactcagcttttatgtatggttagagggtttactggaaattaaatctcagaaagtgagcttttgttggcaaatattttgtattactaatatagttatttcctatgtaacgctatattatttttgcatatcctgcctttggttgtttgtggttttacttttttaatttttttagagactttgtcacccaaacttcagtgcagtggcacaatcatggttcacagcatcttccaactcctgggctcaagctattctcccacctcagcctcccgagtagctgggactacaggcatgtgccaccacacccgactaatttttaaattttttgtagagacagtggctcactgtgttgcccaagctgtccttgagctcctggcctcaagcaatcctcctgctttggcctcccaaagtgctggaattataggctcgagccactgtgcctggcctatgtcctgcctttgaatctcatcttaatccttgaacagaaatattctctccctagaattttcaatattttcctttttcataatatactgtatatgtagatgaaatttgtctatgcagaagggctggcccaagagactaaaatgtgttcttgagtctaaaataaataccatatatgtcagcatctttattaatttaagactgtttagaagtgctcaaatagaagctgtggatacaggttttgcttctgtcttaactgcagtaaaacgaactaacctaagacatgctgacttctggaacaagggcaatttgtagaaatatgctgcaggcagttggagttttgagagatgaatacccttttaaactgacatctcttcagtgtaagtgtttttcaggtttcagaatgtctgctgtttgagggacgccttttttagtttaatgcagtcattggtccaacctaaaatattaagagaggcacagagttgctgacctacttatctcccattaggatgaggactagcgttttagtactctcattgctgaccttcggggatgatgactttgaggaccaggaagcaaacaaattggaaagcctctcagattaagactcctgaaaagagagatctaagaccaaaaatgtgaaagattagaacaagtttccttttagaatgttctgcccaatcaggtagaagaaaggaaagataattttcaagcccatgccccagtctgctagccaacaaggatttattgagcaaatactatgttctgagccccctgcttatgatctggaaagtacaatagcctaaaaggcaaagaacaagtcttgaaggaattttcaagtcctggtggtacctttaggcattagtgagcatccttctccctcctgttctctgagctcctcaagtctttcctcagtgaggaaatcagctctggctgtggtagaaccctctgcagtggttcagctacaaacactttctgagagaatcaagttggccccaacctaaaatttgtttcctttggcagtgaaaggtgtgttggtaaaaggctctttcagcattacctggatgaagtggcatttgctacttaaccccaagactcttgttcagtgcacggttctattcctaaaatgtcctctcctcagctaccagacaattcaacagtggccctgggtagcgccaaaataacccatcatagaaacactgcttgagagtgaatagtagataggcttgagctttgccttaattaagaggatgagatcgggtctctttaatcgccaaaatagcctctcagactacacaaagacagaactgtctcttttgctgactacatgcaatttatttaaattagtgttgcacattcaacgatggtgtggaagctatattagaaaaccaccaaattgaatgagttttctaggtctttggttagggataaaaagggcattagccacattgaatgggatttgcatctcgttagcttgcccgtatgtcctcagctattggacacaatggagggtgcacgtctctcttttcagctgggtagtctgcttcagttgtgattctcctgggaattaaaattgtgaactagagtcatggtgggggaaggggaagggctggaacttgtctgaccacaccctcccccgctttttgtagttcaagattataatagtttgccttagcagcagcaaaatctatctcagtgtttagtactctcctcggtattggctgtgaacaatctccttgcagatattgggcagctggctctccttattgttcagcatatgtccagggttccctccaatgcactggattctgcttatggaaggcaaaataattaccatgttagtccaagaaagagattataaaagtgaacctcttatgcgaagtaaacattttggatatccccttatttagcgtgaccagtgagatgtcacccacagaaagtggataaaagggtacccaaatgggctgaaggccacaggatcagctactctctatccataaacacccttgtcaactgtgtggatgcttcatctgacaccctgtccttcctctccttccaagtatgaatcatccttgtcactccatttccttcaccacccaaatcctggccctatacttagtacttcctgagacctctagaacagaagtacccatgggtcctcagccactttaccccatgtgtgggtctgatggctaagatgagctgtcctgaatagctttaaaagtaactccagggagaaaaactaaatgtggctcgctaaaagataacacttaatctatacagtttcgtagagggtattctggatgttcggatctgggttgctgcagaaaacaaatggcaataactgggtatctttagcttctcaatcttagccaataacaaagccagcaatcaaaactcaattcaacagttacagaatatggtctccagactcctgccaccattaaacagaattctttcttacaatgctgctttccatcttataaaaacaatgctttgtccatctgttgtggcacacacgctgtacagcaaatgagccttcaatgataaatgttctcttttgccccaggtcacgcggcagtcatagtcatgtacaatcaagtgaccatttatttagaggaaggatgagcagaggctaactgcagtctttttgctgtttttccctattttctgccttcaagtagcaattagcctttgagtatccttcatccttttccccccacaaatggtgtctcaatctagtaacctcacgtataaagcaaccgatgactgaaggctaaaatccactcagagaccacaaaccacccactaaaacaacaggaaaagatctgggagcctggaaagggaagaggtgggagtgagggtacgtggggccctgtgcaaagtgctggtttttcttgtgacatttactctaaagtctctgcttaagctacagaccttggagaagaaagtatattttactcatttttaacacaatttcattaaaggacaaagaaattcgatttcttagggatttcctctataagcatttttcttgtagtccacatatattgtttcacttaaacaaatattctgaatttttttgtttcgttttgacttgttttgttttgtttgagacagagtctcacactgtcactcaggctggagtgcagtggtgcgatctctgctcactgcaacctccgcctcccgggtttaaacaattatcctgcctcagcctcccaagtagctgggactacaggtcccatgcctggttaatttttgtattttttggtagagacagggttttgccgtgttgcccaggctcgtctcaaattcctgacctcaggtgatccacctgcctcggcctcccaaagtgctgggattacaggcatgagccatcgcacctggccagattctgaatttttaaacagtatctactagaaatcaaattcatttttcttgttaaaaagcctttaaacatcaagaaggggaaataattattaagcatttgcttggaacagttgaagtagtttctgtaatagaaggaagacagatttgccagggtatgaaattctgaatcccatctgcacggaagctggttttcatttgtaatgcagtacaaaatattcttggcatctttggtgcttattgcacacagtatactccatgctaaaactaaatctcgatagaactaaatacatttctttcgttagattttttttctaagcattttctctcgttcaagtcccttggataaatgcattcaccaagtactgccaggtctttctacctctgcagagtttagtcttcaatcttccttattcagccagttcattcagctactatctattgatgggggccgagggggacaggagttcacaggctaacctgagagaagaaggcaaggcacatacacccctgcccgtgtcctagatctgtctttcagtctctaggggcctaggccctggctttctgaattttacacatgatgactgctacggtacttacagcctcaatacgtttgccatccacactatttttttttttttaagagacaaggtcttgctctgctgcccaggctggagtacagtggcttgatcatggctcactgcagcctttgcctccagggctcaagcgatcctcccatctcagcctcctgagtagctggaactgcaggtgcatgccaccatgactggctactttttgtatattttttgcaggacagggttttgacatgctgtccaggctggtctccaactcttgggctcaagcgatctgcctgcctccacctccccaaagtgctggtattacaggcatgagccactgcacccagcccatgttcagtctcaaaaccagtagaattcagttacaaaaacaaaaaacacaccaaacaaacacttgtctcaggcataacatattaccttgttgatttattgtaccacagctggaaatatggggactgtcagtttctcctgagaatctgggatactgcatgccttaagggagattgaggtgacagtatgctatctgtcttttatttatgaagataaccctgttgacccaccaggatatgctttgtagttttctccatccatcctatcaatttttattagttatgaaatttactggcccctgtggcacaaatctagaagaaccagctcacttggttcaagcctataatttcatcaacatagcaggtaactagctgagctcacttggaactgagatcataataatgatttaacctctcatttgagcaaggctttactgtttaaaaatcactttcacagaaataattccatcttatcttgacaatgtccctgagaggtaacatcttagaagcgaggaaactaagtttccaagaagtcaagtgacttttccagtaaagggggagtcaggactcacacctaggatgtctttctcactaaaatacacgctcaagtatacttgattggttgacatatgataaatggatacaagaattgtgggaagctctagaagaaaggatgttttgttgagaaaacaaatctaggaaagtgtctggaaaagtggttttcaatagagattgtttactttaaatttaactctagacccaagaatatcacataggaaaccattagggagtcatgtgaacaagacaatcaagtgtcaactcatatgatacagacattaagtacaatgatggttcagaaaagagagagaacacaataaggtaataaatcaaggataatataattgaggaagagggactaaagttagaacttaaagaatgtgcaagatttagatggaagagggaagtgggaagggcacaatgggcattgggaacaacccaagcaaaggtggagagtcattttccagacagggattaggagccagacacatctgatgggaggagggactgagcaggtctaggcaaggaagtcgtgggcattgaggtgaaataaggaggtggaatcaaagaggatcttcagtgcctattggagaaatacagacttgatgcttaggtgctctaaagggtggcggcatgagggagaatctgctccatgcctctgtcctagcatccggctgtcccacgcttcccttggcttataaatagtgttctgtgtcttcacataatcgtccctccatgcctgtctctgtgtccaaattccccctttttgtaaggacatcagtcatattggattagggcccactctaatgacttcattttaacttgattacctccctaaagacctacactgtacaggttgagcatcccaaatccaaaaatctgaaatgctccaagtccaaaacattttgggtgctgacatgatgctcaaaggaaatgctcattggagcatttcggatttcagtcttttggattgcggatgctcaaccagtcagtatctgcacatattccaaaatatgaaaaaaaaccaaaatccaaaaatacttccggccccaagcattaggataaaagatactcaacttgtagtatttccaaatacagtcacaatctgaggtactgggagacatcaatatatctttttggagggagggggacacaattcaactctaacagccacctttaaagagtcatgagtagccaggcgaggtggctgacgcctgtaatcccagcactttgggaggccgaggcaggcagatggatcgagaccagcctggccaacatggtgaaaccccgtctctactaaaaatacaaaaattagctggtcgtggtggcgcacgcctgtagtcccagctacttggcaggctgaggcagaagaatcgtttgaacctgggaggcagaggttgcagtgagccaagatcatgccactgcgctccagcctggtgacagagtgaggctgcatctcaaaacaataaataaataataaattttcaaaaataaaaaaaattgagtcgtgaccagcacagtgagaggcaaagaggtgttttagtgagagtggactgaccccagcatgcagaatatgctggaaggaagggagggaactagaggccataggttggggcgggggtggagaaaagtagataaaatcaagacacatttcaaaggaagagttgaaaagatttaagtagtagcaatggtaatgtgtcgttaagtctagaacataacagtttacagaacattcccatgtctcctttctcctttgtacctgacttaggggctgagtggtgtcttcagggtttctggccctgggagagaagctccagtgataaggtcagccactccagtgagagtggctagcaaaggcagcagggggagactcagagctgcaggtgctgaattggaggtggtgacagagccgggtggagctgtcccctgggccactggaaacctaagccagctgccccctctctagacatagatttggaagtcaaatgcattccagcagtcatctaatcacaagagtgggtgcggcctctgagtgagtgaatgtaggagaagagcagtggcttgatgttttggcaaattcccggagttagaagattgctaagaataaggataagaagcatttaaagtagaggagaaatggtaaagttctctacttccaaagccaaagaaaaagagtttccagtagaaggtgggaggagaagagggacgactgggagaagactttggtttagctaaaatgaggacatggggaaaagaaagtgccaaagaaaggaaggaaggaagtcagatgataattacagggtggcaggatttagaaaatggtgtggggggtttttattggaaagttgtggggttttctttttgagatattgattactttacttacagtcaaattcaccttttctgatgttcaattctgtgaattttgacaaatgaatatagttctgtaaccatgactactgttgagataggaccaattatatcacccccaaaattctttgttgctgaggtgcttttttgtttttttagaggaaaccaatgtgtatttgaagtcagaaaggaagaaacccatgggaaaggaggagatgatggtgttaaagaggaaagggttgaaggagtgaggcgtggaggtggtagggaggcaggtgggccactgagaatgcttcaattttggtgggaaggaacatttcctctcttcctatgaagtagaaggaaggatggatgcatacattcagggtctatgatatctttttatggttaattccaaaactcctgccagcaaaaccatttcctgctgagagagatgttaaatgttgcattgcataatttctgccacggaggtatgatttcctgttgcaatcactgtttgcaggaattacatgcaaggggagtacaggcaccgggctgctttgctttgggatatgtgcccaaatcctgctctaatgtaataccatagcaattttagaactaacaactttaaaattcttcaaagttaagtgcatctgcatcttttcctgcaccatacagtgagaaagcttggcagcaataatggcttcaatccccataaatactcctgacaggtgtaaatgagtcactgcggaagagctagcttccacagacatgtccttggggcattatttggcagaagagattgaattctcatcattttatgctcaagactcacaaccactcagaagtgcagttttctccttgacatctatgatgttgcttgcatctccctttatccttgcagtcacactgtgattcaggggtgggaggaaagaaggtgttggatagcgattctcaaactgtgggcttcatgagcgggttgtgaatcaagttagtgagttgcagccagtttactgaaaaatgaaatagaataggaaatagcagagggcatcgggctaaatgtgatctcatgcaacctttgtttcagtgaaatatatgtatctattactggactgcaacataaaatacatttctgctgcggatctcagtcacaaaagtttggaaactgaatgtagaagtatgcagatcctttatgaccctaggcaggctactgaatgtccttgtggcttagagtcattgtctgtaaaatgaggctcataagttacctactctgtatggctgttgagagtgttaaacagaaaatgcataggtagcattaggtgctgtgcctggttaacagtcaatgcttgtgatgatgatttgttttcctgcctagatctataggtcaaatttttattcaatgcccagacctttcttctgagcctagaactataactcagcagctatttgacatctccaggcagttgttctacatgcatctccaactcagcatgtccaaagtggaactcaattaattgccactttctctctccaattcttaaccttccccgtgccctgtcccaccctcgagcacacagacccctctgctgcccccagctgtgtacttcatatgtggtgcttccaaactgcttctagttggtcttcctccactaacacacatatgtcttcaggtttcctctgccttgaatgcttgttccacttttttgttgtatgactcactctttcccatccttcagggcttaatacaaattggttttccagtcagaaagatgtaggcttgaagtcactaatcattggtgacagctgtgtgactctgagaagcaaatttctgaagcactcaaagtcagtttgttcctctgtaaaatgggaaaagctgtgcctgcttcatagagttaagataattttttttttttttgagacaaggtcttgctctgttgcccaggttggagtgcagtggcatgatcacggctcactacagccttgacctcccgagctcaaggaattctcctgcctcagcctcccaagtagctgggactacaggcaggcacaaccatgcctgcctaattttttgtatttttcatagagatgaggtttcaccatgttgcccaggctggtctcgaactcctcaacttaagtgatccacctgcctcagcctcccaaagtgctgggattacaggtgtgagccatggtgccccgccaagttaagagaattaaatgaattcttgtgtgtatagaatagtacccagcacatacagagtagttaataaatggctgtgattctttttcatttttaaagaaggctcaattcacctctttctagagcttcttacagacctgaatgtgtcaggttgttgaagagctttgcagttttgcaccagctattccttctgatcagattaccttttccacacttcttcctttgaccaagccctactcctccctcaaggctcaacccaagtgtcacctcctccgggaccctgccaacatcctgtgctcacctccatcagaattcttgaccacctaaactatgattaccttctttccccctagattctaagtctcctgagggctccatgtgacatgtgtcgtgggagggatccggtggggatcaaatcatgggggcagtttcccccatgctgtactcatgattgtgagagagttctcttgagatctgatggttttataagcatctcgcatttctcctgcttgcactcattctccctcctgccaccctgtgaagaggtgccttctgccatgattgtaagtttactgaggccttcccagtcctgcagaactgtgagtcaattaaaccttttttttctttataaattacccagtgtcgggtatttcttcatagcagcatgggaatgcatggatacagttaaggccatccccaacatggcttctattgcatgttctagccttttcttctacttatcctcaccttgtacctcataccatggaaaactaggctccttactccctcactgtgccccatacctcatttccttgtatgcctattcatgctggctctttctgtttagccccacaaacccactaaagccctctcaaatgctaccacatgacaattctagaacctttagtgatctactttttttaaacaaacagtagtagttgtcctcaattctgctttgcatcccacagcaacccactatggacttttcttgtggagaagattgtcctttatacagcagtttctttacatacttgtttttttatggcaagttgtttgagtctgaggattgtgtctttttcttttcttttcttttcttttctttttcctttcttttcttttctcttgagacagggtctcactcttgtcaccttggctggagtgcagtggtacaatcacagctcactgcagcctcgacctcctgggttcaagagatcctcccaactcagcctcctcagtagctgggactataggtgtgtaccaccatacctggctaatttttaaatttttggtagagatgggggtctcactatgttgcctaggcctggtctcaaactcctaggcttaagcaatcctcctgcctgggcctcccaaagtgctcatgtaatatgcatgagccacctcgcacagccagaggattatgtcttaaacatctttgtaaacttacagtatcaaggacattacattgcttgtcttttctcataagtgtttgaggaaacaaatagaattgaaaatcagctagatttggttgtgctttctgcttgctaatttaacttttgggggttggggtgtgggaaattaaggtttaacttgtcttttgactcttaaatatatttcttctacatgcaattggagctggagttgctacatttagcaattaggcatgtaaacattagtaccatattataaccacattgttgtaggcatttttgattaattgattattaatattaattttagtactaatatacctttaatgctattgtttatggctcttagttacttaggagtgtgcatactaataaaaagagtcaagaggccaggagcagtggctcatgcctataatcccagcactttgggaggctgaggtgggcggatcacgaggtcaggagtttgagaccagcctgaccaacatagtgaaaccctgtctctactgaaaatacaaaaaattagccgagggtggtggcaggcacctgtaatcccaactactcaggaggctgaggcaggagaatcacttgaactcaggaggcggaagttgcagtgagctgagattgcgccattgcatttcagcccaggcgacagtgcgagactccgactcaaaaaaaaaagagtcaaaatatatgaaatgtgaaaatgtaaatacataaacacatttatgagtggtagttgtatacatacatactttctactttatcaaagtcaggacatctatgaatggttatacaaatggttatacaaatattatacaaatattacaacttaattgtatctttttttcaaaaaaacagaagatccattggtagtatgctctccagctccctccctctgtgacttacaccttcgctagtcatttgaaagcttctgtgggagtgtgtggtaagtgacctgccattgtggggagtggaagtggcatgacctcaggagccagttctgagtccaggtgaaccaaagctcagtttctttcatctttgaacctgaacctcttacctccaagaaaaagggcccaggaatttgggccttcttgtttatttgtccttctgcccctctccctatctaacccctgggtaagggtgagcttgaaggtgatggtgacagtggcttctgtgtgtgtcagtccaccctccaagcaatgcttagaaaccagtccataagccaattaacacatcatttttagggcagatttgcaagttctcagttgtttacatgtttcgttaagtactaacctccaaattaataaagcatgacacatgacatcacacatttcacaatttgtacccaagcaaagttcatggaggtaaaggtaatgaattagcggttgtgaaaaatcacacattcctttactggagacaggagagacatgtagaatatattggcaatgaccaaaaattgacttctaagtacttttgagattggccctgggaagcatcgtatgaatctctggcaagggaagaaaggactggactccagggagaggaaaagcatgtataaaggtataacggtttaagaaaaagagagaactggaataacccaggattctctggaggcatagaatgagtgcattttaagtcttttaaagaagacttgttgtaaggcaacaagcctggagccaagaaatgtagcaattccagctccagtcgcatgcactagacctgctgtgcttaaatgtcctgtgattgggtcatggaattgcagcatgtccagcacttgaagaggtttggatgctttaagtcactgcaagaggccaggagatggggtcacagagacagaagagacagactgtcttgtacagaaacctaagggctctctattatggactgaatgttcatgaatccccccaaaatcatatgttgaaggcttaaccccactgtgacggtatttggagacggagcctttggaaggtgattagggttagataagatcatgagaggtggctgaggccttgttgacaggattagtgctcagtctccttagttagaaaataactctggcggccgggcgtggtggctcacgcctgtaatcccagcactttgggaggccgaggtgggtggatcacgaggtcagatgatcgagaccatcctggctaacacagcgaaaccccatctctactaaaaatacaaaaaattagccaggcgtcgtggcgggcacctgtagtcccagctactcgggaggctgaggcaggagaatggcgtgaacgcgggaggcagagcttgcagtgagccgagatcgtgccactgcactccagcctaggagacacagcgtgactccgtctcaaaaaaaaaaaaaaaagaactctggctttgatagaattgttttggagattttatcataaagatagtgctctctctctctctctctctctctgcctttctgttattttctttctattcctttctaactaagagagaaagttatcctctatttgtaagtgttaaagaatgcaatcaccatgatactgcttcacatcccctttagtgtaaaagtgccttgtgtctagtaagcagttgcatcatcattgcatgaaagtggaataaatgaatgaatacatgaatgttagaagtaagtggcctgcaccaggttttcttctcgttctgtcttcttctctcttgcctttcttgttctcctttctcttcaacacataacatcttttattaggtatatacatgtctcctttgttcgtctttgccttaataagaaacaacattttcgagcaatatgaaatgtctatgcatgacagcatcctaactttctttctcttttttttttttttttttgtaagatggagtctcgctctgtcacccaggctggagtgcagtggcgttatctgcaacctccgcctcctgggaggcaggctcaagcaattctcctgtctcagcctcccgagtagttgggactgcatccacgcgccacacgcccagctaatttttctatttttagtagagagagggtttcaccatgttgcccaggctggtctcgtactcctgggctcaaacaatccacccgtctcagcctcccaaaatgctgggattacaggcataagccaccacgcctggccagcatcctaactttctgcagcagtaagtaggatccctaataaaggctgaatatcatactcatacccacaattccttacttggtttaaatacaaaagattatcgctgccaaactgtgcataagaattggtagactatgtttgaaaatgttttcctttaataatattgcaaatacctgaagccaggcaataaaagtaagacacaatatcttatttggtagtgttttcttttcaatattgttttcagactcccagttggaaggaagaggttttgtatcacagtttatactacatatttgcataaacagtaaatatttttctcctacttaaaacaaaaatcaaataatgtttagtaattagactaccttcagccactgtgaaaggacttagtttagggtaaatggtgtcttttcctacactgcttctattatcagtagaaggttactacctacgcttctagggctctccagattttaacagctcatgaattcagaatacatgaaaaagcaagagttaactacagaatatttaaacagttgttttaattttattacttccagtatttgcatgtatccaataaccatataaccatgtaaatatattataaagcatacctcaatgactggaggagaatattttcagtaagtatattaaaatcgtttccctggccgggcgtggtggctcacgcctgtaatcccagcactttgggaggccgaagcaggcggatcacaaggtctggagtttgagaccagcctgatcaacatggtgaaaccttgtctctactaaaaatacaaaaattagctgggcgtggtgacgcacagctgtaatcccagctactccggaggctgaggcaggagaatcgcttgaacctgggaggcggaggttgcagtgagccgagattgcgccactgcactccagcctgagtgacagagcgagactccctctcagaaaaacaaacaaacaaaaaaaccttttcctgtagagtatgtgtcactcttaagtaggttaagatgatcttgcttacacctaacagatcccttctacaagagctcaaagggatctttagcagatgtccgatcataacaagtagttctgaggtgtctcacaggagtacctggtctaggaggctgtgttctccagagcagcgttgatcacacagctctggctaatgtctaggcaggctggacacccagtccttcctcatcgcacattgttggaagccatgtgccaagactgcatttgtgctgcaccatcgttgggggatggtcctgccccctccccgatggaggtcacaggtttgtgggcgagacacctctaactaaacaaacaaatattcctttacgaactgtgacaactgccatgaaggattcaaagggggcagagtgatacataacaaaggggcacacccacttaagtcaggagggttaggaaggcctcagagaggaggcagcatttgagcatgtgagcagagaacccaggagcagagaacccagggagcaggagcaacagcagggctaggaggagcgggaaccttgcattaagagcgcctcgttgctcatgaagatccattcatttagccatgaactaaaacaaggcggcctccttttctgaacttatctcagaatttcgacctgaggaaacgggtgcacagattcttgaaaagccagaaacagtacagagagaacggaggagaggccacacgtatgccggataaaggtcccaggatgctgctaggagagcactggccattagagtaaacagaaaaatagaaatgaaacctgtttttataatgaataacttttatagtctaagtttaaatgaagattgggttttcccatttctgggggcaaacaaacatgtgttaatagctaattaaaaatagaatgggaattctactgaggcccattatggaacagggggcaggcaaggtgctggaacatgctggccatctgatgccaaccacgtgggtcctttgaataaatctgtgtgcttttatcacttcaccctgctcaccaatttgaccggattaaaaggcttcataacagtctgcacaactgctaatgatgtaactccgctcttacatgtttattttagtgttggatttttattgttaaggtcactccgaggatatgcggattcttaactacacaaagttggtacttagccttggtctattttgtcttgtatcttttttttttttctttcctattcccaggagtctgccttctctgtgaatccccctctaacaggatgtcgtggtttatttattccctgccctttgccatgtggatgggcggatttttaaccttttagtaccataatcctttgtggtaggttcctgtttctctgctatcttgggaactcctgctgttcgaccttggtgtttgcatatttataaactcttaaccattaactcttcaagcagaccagctgcagcatgagagctatttgctattcctcagcatcgttttctagtctcacttagcaagacctttgcttgttgtattcccatttgtgtctgttgtggaacaggctcgacagaactactgaaattgtaaagaaactcaggcagcctgcacagacctccagctccctgggtctgcctgtaaagagaggacgctggggcagatggagagcagcaggcactcggagttaggcctgagatctgcgaatggctttgccacttgcaggttgtaaggcatggtgggggctgggatcaaatcacctccccagctctctgtttctttgtctatacaatggtgatcaaactggatatctccactgagcaccaggtgtcctgaagagatgggcgggggtggaggcagcatgagtgggaggtgagcatgttggcaggggccccagggcccgggcagctctctagagaaaggatttcatggctttaaaaccacaggactctgtcacctccaaggtcctttccaacttcaaacacacctctgattctatgaaaggatgacagtcttctgccttcctgcttcattactggtggagaggccctgccaaggcaaggagggaagtggactaggaggtaggcctgaggctagggtggagcccccaagcttcctatcagtaccgccaaactgaactgaagccccccacacaattggaaagtgatagagaaggtgatggagtttatgcccttgattcaggttgttgggtttaaaactgaagatccacatgaaggggtgactcttttcgttgagagagtaccagtgctgtgccatgtggcagggcaaagacgaagagcagtgccaggttccttgactgtgggctttgcttcttcatggctagggatggggagcactggatgcagttacatccttgctagatcccagatcctcactttttgcttttgacagaagtctcaggtaatagacttgctttctttcttcagcagatagtagttaaaaccaagtggcaacctgataggcagccagctgttatctatgactcaaactattaaggatggagacatctgtacctgggccatgttcttcccagaggagagcccttactaagtcagagggtattattgtgacatctgaccttgaggacagttcaacatgtcaatcaggctagataagcaaattctttatctagtaaaaatggctaggcatggataatatgtggtttcttattctccttcctcctccccctcctttttttttttccccccccccttgagacaggatctctcattctattgcccagactggagagagagcagtggcacaatcactgcttgctgcagcctcaacctcccgggctcaagtgaccctcctgcctcagcctcccaagtagctgggaccacaggcatgcgccatcacttcctgctaatttctaaatttttttgtagaaatggggtctccctatgttgcccaggctagtctggaaatcctagcttcaagcaatactcttgcctcagcctcccaaagtgctgggattacacacatgagctactgtgccactgccatcttcttcttcttcttcttcttgttcttcttgttcttcttcttcttcttcttcttcttctcctccttcttcttctcctccttttccttctccttcctcttctcctccttcttctcttctccttcctcttctttcctcctcctcctcctcctcctcctcctcctcctcctcctcctcctcctcctcctcctcctcctcctcttcttcttcttcttcttcttcttcttcttcttcctcttcttcttcttcttcttcttcttcttcttcttcttcttcttcttcttcttcttcttcttcttcttcttcttcttcttcttttaattagagaggaggcctcactatgttgcccgagctgatcttgaactcctgggctcaagcaatcctcctgcctcagtctccaaagtagctgagattactggtgtgtaccactgcacctagcaacacatagttttttgaagatgtacaaaaatttgattcttggaatggatttataagaaagctttgcatttcctctgggttgagggaaacaactttattaattgcagtgtctttggaacaggtacatattttaatattattagagaaagaatttctggcctgcaaataattggatatgaactagagaataaatatcttcctacattgcaggagaaagtaaaacataacatcctgtttctatccacagatacttaagagggaaagggagaaggaaaggaaagaatggaattgggaattacatggcataacttgggatacctgttttacagctaaatcatttgtgatctgatttccatgttggtgggacttggcctgtttctggcaggttcctcctgccttccctcattttccccagctttcttcattcatcacaggttcttttttctaccatcttctgtgggtaaaatctagggggcttgtgaccctctgagatggttcttgctgcacgtgtctgtgcacagcactgagaagcaaagtacacacacagtcagttcttgcaccagtcaggagcagcttgcctccacctacaaaacacagggtgatcatgcgtctaaggaactgattatcttttccatttcttatcttctgcacaagccaatggtaagttctgtttacttacttatcttggcttatgcacaagtaaactgtaggtattgtttttcatttacgaggtttttgctatccttgggttggtttataatgttgttagtcagaccaggttgtgtcttaatgtccagacagtgagttagggtattacagacccaccaactggattttcctctgaagcaaaatctactaaaggtgtgtcagccattttgttaggcttgagcaggggcgggcaaactatggcctgtgagccaaatctggcccacggcctgtttttgtacaaccagtgagctaatgatggtttttatgtgtttaaataatttggaaaaaaccaacagaaaaataatattctgtgacatgagaaaattatttcaagtttcagtgtttataaatataattttattgaacacagttataatcattcctttaacaactgttatttatttgtttgtttatatacttatttattttgagacagggtctgtctttgttgcttaggatggcagtgcatggtgcaatcacagctcactgcaacctctcctcccgggttcaagcgatcctcccacctcagcctcccaagtatttgggactacaggtgtgcaccaccatgcacggctagtttctttgtattttttgtagagacagggttttgccatgttgcccaggctggtctcaattttctgagctcaagcaatctgcctgcctcagcctctgaaagtgctgggattacaggcatgaggcaccacacccagcccctttacctactgttaatggctgctctaacactacaataaaattgggcagttgcaacggatactgtattgactcacaagtcaataaagtgtttgctatactggccctttacagaaaaggtttgctgacctctttgcttgtataattaaacagcaacaatagttcacatattttgagtcttcctatgtgccaggcaacgtgctaagcatcttttgggcattgtttaatcctcataacaaccctataaaaagtatctcttttaaaaagtaaaaagtatctcttttactttttacagatgaagaaaaggagggtaagagaggtggtgtaatttggccaaaatcacactgttgggcagtatcagagctgggatttgtacccacatttgtctgattccagagcctggattcttatccaccacagaacaccaacatgcctgtatttcctaggtgggtctgaagtagaggccacagataaaaattgttaattgtctgaagcttaattaacttctatttcaagtaatttaatttagtttattatttgagatttagtatctgtctctgttatgagaatgtgtacattccttaaggatagtgactatctgtggctcctaacacagtgcctagcacatagtagaagctaagttaaaaatctgttgaatgaagtggatagggagtaggaaagagggtgggagaaagggggaggaagaatagaggatgagagacattatcaaggaagagtcagggtgcctagcattggccctaaggtcatggatggctctgcttggcactgggctcaccctgaccaagggctcacaacaccctcgggtcaggcctcacctgaccgtgcacacattccatctgctgctgcttgacttctattcttccgcccttgctcttcccctctgcctctggtggccttgtggcttcctggcactggtccagatgcaatgccaaccttgagaggcgcatcaatgtttgtttagagtgcattcatttggaggaggatgtggaagtgaggcctcccgttctcatgtccagagacgatgacttacatcaaagggcaaaactgacgctggaaggggaccaaaaggaatcatttctcttctgatctttttaagaaggctgctggctctaagggagagatgctggccactgaggactcatttccacaggccgctgaccagcacaaaagtccaggtttctttctcatgagaaccagtggcaggtaggcatgaacagactctcttccttcctgggactggcctgggactagagttagtgtgagacctcagcaagagtaacaaagtagcactgcagcctctcagctgtgtcaaaaacagcagggagacaccagtgctaagtgggtgaggatgcagagggaggctgtgtccagcctggtgtgataaaagtgtttaggcaccaggcgcggtcactcacgcctgtagtcccagcacttcgggaggccgaggcaggcagatcatttaaggtcaggagtttgagatcagcctggccaacatgccaaaaccccgtctctactaaaaatacaaaaaaattagctggacatggtggcacatgcctgtaatcccagctactcaggaggctgaggcaggagaattgcttgcacccaggaggctgaggttgctgtgagctgagatagcgccaccacactccagcctgggaaacagagtgagactctgtctcaaaaaaaaaaaaaaaaaaaaaaaactgtataggcatatctcttctgattttgcatgattctgctcgctatcatttattgatgtattttatttggcttatgaaaaggtgatgaagtgtagtgttttattaaactattcatatgcccaaaaaaaccccacaaatgcttactgaatccttaaatgagcccagctccaggagtaaaaaaagtgaattatcagtcatttctaaaggaactcataaatctagtagtggccataataatgatagtaataatttatgttctgactgcttatgatgcatcaggcattggatcatgtgttttttttttttttttttgagatggagtctcgctctgtcccccaggctggagtgcggtgacacagtctctgctcactggcgcgtccgcctctgggattcaagcgattcttgtgcttcagcctcctgaatagctgggattacaggcgcctgccaccatgcccggctaatttttatacttttaatagagacagggtttcaccatgttggccaggctagtcttgaactcctgagctcaggtgatccacctgtctcagcctcccaaagtgctgagattacaggcgtgagccaccgcacccggcctagatcaggttctttacatagactaaacaaaccatttccttctcctaacaacgctatgtagtcagtacccttgtcatcccccgtacacttgaggtaattgaggaatacaggttaaattacttacccagggttatacaacttgtaagtggcagagccaggatccaaacccattcttggctctagagcccatcctcttctccactaccgcacctgagacttactgtgtgttaggcatggggctgacagtgacacactggatcatttaatcatcacaatggcattaggaggtagcattttacaaacgagctaacagacaggcaaggagcaacctgcagataaagcaaatccagatatgtctccagagcccgtgccttaatcgcagatgcattctgactttcatcataggattctaatcgtggatgaaagtgaccctgagttgtagtgccaggcaggttgcttaggaaaatactcttctggtaacatgttggaggggcagccttctgaggatggtgtcagattcccctgtcctctgattagctccctctgccaaggtgcccaggctcctacttcagtgtcacctccaggtttcaaagcatggaaacccaagcatgttactcggagaaagtcccacccccagcatgggcgcatcggcttagaaccctccagggttagcaggcaaagagctgtggaccccggacacgggaaaaggccacagtcgggagaactcctgttgctggagggccaggcgggggcgatccccagggctcccagcttttaatgctgtcaccgcgggccttactccctcctcttccccacatcgccaccacttgaatcagttcttttacaaagtggttctatttcctggtgagacaaaaaggttagaaaaggaaacctagagggggtgggggaaagacagaggttcggaataccggcgcgcaatcgccatctgggtggaggggacccgccttcttttcttccgcctgagcgcagctcggctcccgcctcggggcggggcctgttgctatggagcccgggccccggcagagcctgcggggtgaaagcccctagggctccgcctggcatgcgtggccggggctgtctgagatttccccaggtcggtggttatgaccgcaggatggaatcgtagaggtcgggtgatttggtcagtagagaggaacatttgcgaggttctctctgaattacatgttggtctaaaagtaatccactatctgggaccgagaggaaagcatgtgtggaagaggcaggcattattagcagcgcgtccgcctcggccacctccctgctcccgcctcggccacctccctgctcccgccccggccctgggggcctctgttcagcctccaccagctcagtcgcccacggagactcccgaactcttaaatcccagccctgtagtcaaaaccactgcattaattaaacaaggtaaactggtgaggcaagcaggaacttgacaccgccttgaatttaattgttaaaatgagaagtgtggtaatggagctctgcttaagagaaaaacaatacttgataccgatgtgcacatcgatgtggacacggatgcaatcaggaacccatagttagcaccgggagattacattccgggtatactcaagatagatagagtcaactttgaattctcgaggccaagcaatgggcgaaacaaaagagctttgtgtttgcgtgcttttgctttttgttacagtcagagcaggacaaagaataatgaaggagtagacatgttattacttgggcatttaataatcagtgcatggcagagccttgtgttttgcttgtctttttttttttcttttcttttcttttttaaagacagggcctcactctgtcacccagactggagtacagaggccccatctcagcttactacaacctcagcttcttgggttcaagtgattctcctgcctcagcctcccaagtagctgggactacaggcacgcgccaccatgcctggctaatttatgtatttttagtagtgacggggttttgccatgttgaccaggctggtctcgagcgcctgatctcaagggatctgcccaccttggcctccaaaagtgctgggattacaggcgtgagccaccacaccaggcctacttcagtcttttctacaaaactacagaactccctatcaagagtaatgctagagaaggaatattaatgggatggtttgttagtacctagaaaaaaaagcatcctgagttccataagaataaatgataccagaccaaccaaaattcctccttggatagggttgctgggcatgaatttatgtccaatatgagtcaatatgagaaaagtgccaggacctcagaggtaattaatagaaggatagagcctggagcaagcaaagtgatggtcttgctctgctctgtgctgggcagatcccacctggatatgtcttcagtttggggcagctccctgtgggaaacatactgggcagggagtcaggggtgcttgacctgggtcacctttactgcaaatacagcccggctgcaaagggctatcctgatccttgagactctgagctgaaggcagataactcagtccccaggagtgattttgagaggttctgtttgtgtcatttatttttttgtcaccagtgccttgtataccacctggcacacaatcacttgtgcaatgtataacattaaagggtcatctgaaggccaggccacttctggtgtgaattcttgggttggaactgggtcagctggttcccaattaatctactcctatccacataaccccaataggttaaggccaacttgcaccttttctcttttaaggatgcttaagagaaagtcctttctgcttcattcaccattacttcctgacagtcctgtttgtccttaaaacctcccccacagccactaatgaatgatcccaacccctaaacataggaggcctcaccagggctactgccagtagagaggaaggggctcggcctcttggggtccaaaccaaaccactcaatcaaactgactacagagagtctggactgtccagaaggagcttggctttgagggccacacctggagtgctgaactgtgaaatccatcataacaatacttcctctccagttgctcatgactgaactgaaggctggaaataattacttcttaccatcttctttcataaaaccattgggcaatacttttcataaagtttttatgtttgtttttctttatatctttaaaatttttttctacttgacatgttaatgaggtacagtgtgatgtttccatatggatgcacattgtgtaataattaaatcagggtacttagcatatgcatcacctcatacctttattatttctttgtagtgagaacattcaaaattctctcttctagctattttgaaatatgcaggccaggtgcagtggctcatgcctgtaatttcaacactttgggaagctgagatgggcatatcacttgagcccaggagttctagaccagcctgggcagcatggcaaaaccctgtctccataaaaaaatacaaaaaattaacttagcatggtggtacacgcctgtagtcccagctactggggagactaaggtgggaggattgcttgagcccaggaggtcgagcagcagtcacgccactgcactcccactccagcttgggcaacagggtgacaccctgtctcaaaaaatacaagttaaaaaatgaaatctacgatacattattgttaactgtagtcactctactgtacaatagaacaccagaacttattccttctatctaactgtagctttatatctgttgactaatctctccctatctgcctcctccaaccccaataaagcttgttgaaatcagagacacagaaaatgaaatgattgcattaggcagcgtttataagctcctgatttgtttgcctcttctagttggttatatctatctcacactgaaacacatcacctctctacttagctggctttgttctactctggagttgcctgattactgttcctgttcttgcacatcctggggcaggtgacatactgaaagaggaacggtgccagccacaagacctggactctagttcacctctattacattatggttactccatcctgggctggtcactttacctttctaaatctcaatttccactaaaataacaatgcctgctctacccgtttctgggttagctttgaggatcaaagagaaaatctatgaaggtactttcttttttctgagatggagtctcactctgtcacccaggctggagtgcagtggcatgatctcggctcactgcaacctctgctgcccaggttcaagattctcctgcctcagcctcctgagtagctgggatcacaggcacctgccactgcacccagctaatttttgtagttttattagtgacggggtttcactatcttggccaggcttgtcttgaactcctgaccttgtgatccacccacttcagcctcccaaagtgctgggattacaggcgtaagccaccactcctggcctatgaaggtaccttctaaatcataaactaccagatatgaagaattgcctatccataacagtctctgatccaactaattctgagatgaactttcacctttatgtcatattatgtcatttgttcattcatagaactttcatcattccctatctacttattgggcacctagtatgtgacaggcactgcactaagggttagtgaattaaaggtaaaagatggaaccttcaacagtttctagcaagaatgctgtggagtacacaggagtggtactcaatccagactgtgggtgggaggatctgggcatcagaggaagactcagagaatccttcctaaagtgagtggtggctttgctgagttctaaaggagcgcaagaagttaaccaggggcaggaggcaggagaggctgagagtgttcctggcagaacaagtggtaagtgagcctagagattagtgtttctcaaaggagatgctactgacattagtgttgtggggacagatgtacttttaacgtactctcccaagcattggagcaggtttggcatccctacacataggcactaaatgttagtagttacccacccccacacacactgggtatgacagccatagtgccccttcacatttccaaatgcacaccctactaccccatgggaggggttggtaccattccttggctgagagccactgctaaaaaaatacatgtggaactgtcagaggtgtttgaacctgagcaactccatcttgaataggagtcaggtaaaatgaggctgaaacctactgggctgcattcccagatggttaagccattctaagtcataggatgagataggacgtcggcacaacatacagaccttgctgataaaacaggttgtagtaaaggagccggcccaaacccaccaaaaccaagatggcctccagagtgacctctggtcctcctcactgttacactcccaccagcgctgcgacagtttacaaatgccatggcaatgtcaggaagttaccctatatgttcgagaaaggggaggcatgaataatccaccccttgtttagcatatcatcaagaaataaccatgtaaatggggaaccagcagccctcagggctgctctgtctatggagtggccattcttttattcctttactttatttataaacttgcttttactttgcactgtggactcgccctgaattccttcttgcaggagatccaagaaccctctcttggggtctggatcgggaccgctttccagtaacagaatgtcttatgaacagagtgtgactagggaggacagaaggtggaaaataatcaggaagcagatgccggattgtaaattactttgtatgccatcctaagatgttcattttctgggataaattttcttgagcagggataggcagactgtatataaagtgcattggattgaacttggcacatcatacagggtcagtaaatactggatcgctatctctcatgctcctgccaatcccaatttagtagcgtacatcctcttcttatgcataggcactgtctgtatacttctccagtgcacaaatcatagtcagactggctgatggcagtttagctctaatctccattcagctggatggaaacagtggggagaggcaagacagctccaagaagtcaataaggtgtgcagtggctgtaatcccaagaatcctgggctcttctctgcccttgagacccccgagtccggccacttgaggccacaatatgggaaactccaactcagaagcataaccagcagccactattaccatctacctacctgttttcaggaagtgccaaggagatgatgcttggcatttccgtgggggcctcccacggttacccaagccccaacttataaacagttggactcatttgccaagacatatgctaaaaatgaggctgcattttcctataataagcaatattatgtgtgtttgttagattcacagctgagcccccaaaacccatttaacccatatagtagttaagccattgtggtgagggtgtttgaaacccagctatcctatgtaatgctatttccaggggaaaaatattcccaattccaggtaaaagatcagaaacagatatcacctgcatttgttccacctttaccccaggcttcagctatacttaggtattactcgctggtcccatgaaccatctcatgcctttgactgtgctgcactcagtgcttgaaatgctccgcacaccccgcacacctccctggccctgtgtatcccttctatgggcgcccagagcatttgcttcctcttgctctcaagcatttaccactctgcattgcaattgcttgcttactaatccatctcccacactagattgtgacctccctgagggctcagaaatattaaattcttctctgtatcctcattgcctactcagtgcttggaacacatgacactcaacaagtcttcattggaatgaatgattgaatgagtaagttaacatcctctggctggaagcccagcaacaagaccaaagatctctcccacttctccaccttcagaaaacagagacctggtctagttataggtctcaagaatctgggttgactggaagaagagaatgagagagatcaggacaaagaatgtgctggggggcggggtcagcatttgatgaatttggctttgggataggcttagtagcagaatgagaagaagaaaggactcctgttgtagtaagtcagacacctgtctgatggcctgtcttaggcttgtaaaactcagtgggggtagcctgcttccagttttagaagtgggtcctaattaaactgtaaacttctaaagcagaacatacgtccgcacaaaaccttgtgcacaaatgtttatagcagcactgttcataatggccaaaaagtggaaacaacccagtgtccatcgactgatgaacagatgaacaaaatgtgctaaattcacgcaatggaatatcgttcagccatacaaaggaacgaaatactgacacatgctaccacatggatgaacttggaaaacattctgccaagtgaaaagagcaagacacacaagaccacatattatatgattccattccagaatagggaaacctttagcgacagaaagtagattagtgattgcttaggactgtggggatgtgatgtgggagggaagagagagatagctaaagggtatgggttgggtgtttgtttgtttgtttgtctgagatgatgaaaatgttccaaaattggctgtggtaatagttgcccacatctatgaatatactaaaagccattaaattgtacactttaaatgggtgaattatatggtatgtgaattacaattcaatgaagctttaaaaaaatccacaaaacttctaaaatagggtgttaactgggattttgagaactgtgtatcacctaaaatggcacgccaaagttggcatgtatgtgcatttctggggtctgtcaattttgctgtattctctgtgatccccctcctcctactaccaccaaaggtaatcaccactgctctgcagagctgaggccccttcaagggctcactgtaatgcttgactgcgtggaaagaatgtgataaatattaatgtaatcaaatatgcagatgcccagttttttaaaataaacattattagcaatccctttgaaactaataactaaccaaggaataggatgcaatactgttccctgcgtttattgttgtagaaaaaggaacggttgtgaattctactctgatatgtaagattttttattctaaattattatttgtaatatggagacctaatcactatcatatggctacttgctgatcatttttacattatttataccttttacaactaagtttaatgacttggcaggaaattaagttatgttatttgtcaagtttctcaacttttaactgaaaacttcatgatcagaagaagaacaaggtctggttatccccgaatcaaaatatgtaccatatgatttttctctgaatcattagaaccacaaaaagcaaagaaatgtcattgcatgatttgactttgtggaaccgtactttatagaccctgccctggggtaaataccaagagaggaaaagtagtaggggcttgtggaactggactgtttgtttgtttgtttgttttttgcatttaaaaaaattatgatatgtgtttaaagctacttgagacatctaaggaaatcagtcgtctctctttctaacgagcaagtgtgtgctctcacactcacgcaaagctcttctctaaatgtgaacttttcatattgaggtaccatatgcccagtttcttcctagaatctattctcactgcgttcaccgtttgcgtcccagcactcccttcgtctgatttgtagcactccctgtacctgccccggctgcgttgcacggagactgcactggtcgcctctcccctggtgaatcctgcagtcactttctggtgatggagctcagcggcccagcacgagagcatggaaacagctgactgctgactcagagggaaagcaagccacccacgaatctcattgcagctcgctgctgcatccctatcccataatcccttgcctggtttgctgcagtcttttcaacagacgctcagtgagaaaaagatgtcctgtaagatcaagaccgattggtgtgaatactgaagggggtcttccacttgttaatgacccagaaacattcctgccgacttccagccttctctcatttcctccatttttctcttcctctgttctgtgcatgaactggcacatcactacttagagcagaagatatgctgggcttctgatgatggctgcactgcatggtagggaattttaaccagtctctttgcatggtgcttcccaacttgaagtgttagcagaaacgtgcgttgttcttttggattgccgcgtagctgcagcgacagacttgggaggatttaattctttgcctcgttggttagtctgtttgtcttcagaaatgggtaggtcctaaatgttcagactgcttagtattgtgccaggtggataactgatttctcctgctctctcggttcttttttctcccttcatctctcatggtgatgctgcatcctctgtagctgtaaaatgcagacccattctttgcttaaacaaaggcaccaaattaacaagtatggggagaaaatcatgcaagattttcttatcaagttctaatgtgatctgactagatttgtatttttaccagtctttattttagtgtgtatcttggcttgttttaaatagaagaattttgccccctgcatctctctgttgggtgcaaacatggagatgaaatatttgatttgcaggattccttcctcgctgccccagggtagaggagaacgtgcgaccctccccccactctgtcctctattagagaatcctggggttgagttccatggctggcagttaccattggaaacccattcattcataatgcatgactcgaccctccgaattctgaatgccattgagggccagcaaacaaacatgtaggagataatttgctttttttctgacaattttttttcctgtctttgaagtacagtcaaatctgggtggagctcaatgatagcattacacagggaaaagaaaaaaagaaaaaaaaaaacccttgggttttgggttggtccttaggtttgcttcctgaaacagtggggattatttttgtgtcagagctttttctacaagtatgccccaccctgacattattccttcttttggggggataggagagcaagtagcaaggcagtttgttttaaattaaaaattgaatgttaataaatggatttctgaaccaaaagataaaatggtattattgtcttaaggaaaagacagtttcaatgtaatagctttcaaaatgaggtgtttaaaagattgtttctctggcttagatcatgttacagcagttttattccttatgaaaatttgttttaaaagaaggttttaaactccagtttatatgtaaggagagccatttgttcatgcagaattcttcaaatgacgtcttagtgttaggattcagttctgcctagtgtgaatctgttttctggtgtctttcattatttcaggcagaggcttgagccccactgttcctaacccactataatgttaaataatgcacgcccctcccaagcagcacacaatgagaagtttcatgtgtgctgtggtatgagaaagcagctttcggatgcagagacaggagtagtaacccttcctaaacctttaagtgtttctgtccaattttctcctaggaagacacaagtgatttgcattggaaaggttaaaacacagctgaatgtaaaaattttctctgatagaacgtgctgtttcaagatatatgaatgcagcatatataacccacacattttttaaaagaagactaaaatctatacacgttttttccataggtaatactatagtcctgcaatgacttaatttttttttattataacaaaagcttcatggattttgttgcttgtgaaataaagttaaaacattcattctttgtcttactaagaaatgaaaatgttctttatctgggtatccttaggcgttaatttctccatacttagggctttcttttatctctttttattaggtaggggaaaatcccaaatatgtagcaatttctaagactcccttgtgcctcttttaattatttctcttataaaactaaaactacccaaatatttgaggtattattgaaatgtgtagaagagaaatacttttgaattttaaaaaatgtgctgccaaattatttactgtcatagttttttcttcaaaaaatatgacttcaattactttttactatggcaaaatgatgatttgcacatacctgtgatagcctttttctttaatctctggtgccatctctgtccctttattacttatataaaggctgtagttcagagtagaatttgctccattatagggttggctattagggttttctgaatattttcattgtgcagatggtctgaatttaacggattagatttcctcatagaaattggagctttagattggaccagaaagtgagaaaataatgagccaagtattcaaatagcatcactgcaggaaacagatttctgcttttagtatgcaaatgtttctattcccttctactttacctcttcggtcttcacattctcgacagcctctatttttccattaagtgctttttgttattgtctttaaacattattaatttaagtacttattctaatcaacaacagaattaaataatgtgcttcgtatataccaggagcaaacaggaggttcctattatgtagagctgtgtctcttagttctgttgtgaaataattttctcttttcccttcttgctagtttcttccaacccctagaattggtaccagcacctagtccccttgctgacctctacctttttttgtggtcccagaatacttagcctctttgtgtagtccccaagcaaagcaagggaggagacctggcaaagtgatgggtgtggagagaggagaccccgagcatcttgactgtcccagagtgctgtgagatgaatgtctattagcctgaccacttaacattccaccacacagacgcagcctaatcttaacaatcggctgccaaaggtgaggcaatggccttctttatatactaaagaaagaggtaggggaaatatgtctttatgatatatcataaagacaagtcaggggctcagcttaaaaatcagcttccatttggtaaaaaccagttcatctgaggaagctgtcatatatctgactctgaaaataaggagaaaaagaaccttggagagcttggacacaccctgcctgaagacaaaagttaaaggggatggcttctgaatgccttccccccaaaacacacacacccacccacacacccacccccccccccacacacacacacacacacacacacatcatcatcatcatcatcatgatcatcatcatcatcatcaggaaagataatgcatctagccttctgatttacaaaatggcccatctgggatagaggcttgatttaactggaaatgggtcaccctgttttaatttcactaaagattgtcctcttttcttctaattgagacctcagtaacaatgcaattcaattgcaggcaaattataataggctgaaattttaaaaattaagaatacccttttcatcatgttttaatttataccacatgttctggcaggtacagggtagcatactgtgatttatagataatccaaatggttcaggatttcctttctataaatgtaccagaagatttgtaattgcttggaaagcagatgtttgcatgtctgcatgagaacaataaaaaatgggctgggccaggcacaatgactcatgcctgtaatcccagcattttaagaggccaaggccggtggattgcttgagcccaggagttcgagaccagcctggccagtatggtgacaccctctcgctactaaaaatacaaaaatttagctggttgtggtggggtacacctgtaatcctagctatgctggaggctgaggcaggagcatcacttgaacctgggaggtggacgttgcagtaagccaagatcacaccactgtactccagcctgggagacagagggagactctgtcttagggagagaaaaaaaaaggcatcttaataaataagtccaactaaagtggcaccaaagagaagcaataacgcaggaatgccataaaattagactgtaggaatgtaattgagtacctttaggatgatgtataatcaaatatgtgacctcttacccacaaatcacatgttaaaattttgtttttcagtagaatcttggcctctgttaccctaccacattccctacaacaggcaaacaagattttgccagctccctccccttctccagaagagcgatttaactttggcttttctctgccattctttcttcctgctcttactcactgtggtgtcagcaataaagagtgtggatagttttctgatctaaatggtataatttgggatggaaaatgtggtctaaatcttagaattgtggacataggcatttttctctcatttcagcttctcctatcaagttcttttgcatttgggggttaattgccaccaaattgtaggagatttgagaaagtgagccaggaaaaacaccagagatgatgtgagggaagaaacgctggagctggatatttttatgcccaaggattttgttatgtgatcattgaattgcttttcccacaacaagctctgtttagttggcaagcccccattaataagggatttatgtgccaaccttcttaggctttttattttcatgcatatgtgtctgtaattgcccaatagttcttcttgcccagtgcacagatacagccgatttaccaagacaacagtattgcaatagagaaagagtttaataaatgcagaaccagctaagtggaagactggactttattactcaaatcagactcccccaaaattccaaggctagggtttttcaagggtagtttggtgggcagggggctagggaatggggagtgttgattgcttgggtcagggatgaaatcataggaggtcgaagctgtcttctggctgtcttcacttcctggatggaattacaaaacttgtggagccagtttactggtttgggtggtgccagctggtccatcagaatacagggtctgaaaaatatcttgaacaccaatcttaggttttacaatagtgatgttttttattttttattgtatttatttattcaataaaatccagaccctgcacaatacaatagtgatgttatctgtaggagcaattggggagggtaggaatcttgcgacctgtggctacatggctccttactgaaccataattctaaccttgtggctgatttgttagttttataaaggtagttttgatcctgagcaaggagaggcttgtttcaggaaagggctgttatcattcctgttttaaagttaaactataaactaaattgctcccaaagttagttcggcctacatctaggaataaacaaagacagcatggaggttagaagcaagatggagtcacctatgtcagattcctttcactgtcataatttttctatgccagatgtttctcactgtcataatttttgtgaaggcgctttcatgtactcaatagttctgtttctttttctgcatctatgaacatgttaaaatatgtcactaatgtttaccctctggatgatggtttatgttgctaagcattagactatcacatgggaggctgggcatggtggttcacgcctgtaatcccagcagtttgggaggctgaagcgagaggatcacttgagcccaagagtccgaaaccagctgtgcaacatagtggcaccccttctctacaaaaatacaaaaattagctgggtgtggtggtgcccacttgtggtcccagctacttgggaggctaaggtgggactctcacttaagcctcggaggtggaggttgcagtgagctgtgagcatgtcactgcactgcagcacgggtgacagagggagaccctgtctcaaaaagaaaaaaaaaaagactatcacattgggaagcaggtaatgtccaaggtcaagtgcaaacattcagatgaccggcaacaaccacactctttatcatggaattcagcaagtgctgctctttgctgctgctgtgaataagtccgtttccatgttatatttcgctagtttgattcattcaaaagataatgtctactatgtaccaggacacttctaggtgctggaactactgcagtgaataatcagatgcaaatctgtgcccttgtaggccttacattctagggggagggcggagacaatatccaaaatatataaattacatagtatgtcggaaggcttagttccagctgctataacaaaaatgccatggattggatgacttaaacaaaaagaatgtattgtctcacagttctagaggttaggaaatctgagatcagggtgcccccatggtgggttctagtgaggccctcttctggctttataggcagatggcccacatggcagagagcagacagagtgggaaagcagtctccctcttatctcctcttacaggggcactaatcccatcataagggctctaccctcatgacctaatcacctcccaaaggcctcacctcctgatcccatcacattgggggttagggcttcaacatatgaatttgggagggacacagacatggagtctataacaggaggtgacccgtgctacggagaaaaacctagcaaggactggggatagcagtgctaggtaactggtggcaatatgcaattttgaacagaatggtcagattgagcaggtgacactgagctggacaaaggggagtgagcttctttgtaagaggtcttgctgtttgttttccacagacagggaacctcagctagtcttccatatgaaaactctttttggctaaggtcaatatcaaactaatgttgaccatttgtattattttaaagtggttctttctgcgtttgctaccatttcctttctactggctttttgtcaatgtgtctgatgttagttcctacatccaaaagcattcgagcttctttacaggcgaagtccaccccaggcatgttttcacacggatcccttcagaagttagttttgcagctctccagcatatagaagagcagttctatattctgatttctttcattatagtgcactgacttccactggttatgtgggtaagaagggtctctgacaatttagaaaacaagatggggaaaggagaccagcaaagcatgtatataaaacatttgttgcttttttaatcaaggagaccagaaactgtggtagtgccccaacgctttgattgaaggccgttgtatattgagtgtattcctcatgacatattcggactgattcagactttccacagtgcttattagctcattctgtgcctcagttcttctgagcacattgtcccattaggagtagtcaaatgttcttcctagtgtgggtatccagggaaggatcattatcctggcaaatctggggatctttggggattggaaaccttttgtgtcgattcttggagttctaaaaatccagatgccttcaacaggtcacttgtgacagatctgtgatactgtcatgattttaaattagtgttaaggagtaaacttaattaatttaccatgcaaattaacaatactacaatatagagacttgctctcacccactacaataattatcataaagttagaatgaaatgttttcatttttggctttagagcataaaatattggctcaagaaatttcatttagtcaacgtatatcatttgattaaaacaaatttttttcttgccaaaaatccaaaattctaaggttaaaaaaaaaaaggaataaagtccaatatgatgctttctctctgcttttttcaatacccagcatggctctgattatttcaaagggtactatgaaaaatttcaaaagctattcaaaataaaattatttttaactgatttcgacggaaaagtttttttttgttttgttttgttttttgtgtttttttttgttatttttttttttaagatggagtctcactctgttgcccaggctagaatgcagtggcatgtcttggctcactgcaagctctccctcctggattcacaccattctcctgcctcagccaccggagtagctggggctacaggcgcctgccgccacgcctgactaattttttgtatttttagtggagacagggtttcactgtgttagccaggatggtcttgatctcctgacctcatgatccacccacctcggcctcccaaagtcctgggattacatgcttgagccaccgcgcatggccagtttaacatctttttaaagaaaatatggaacacttcacaatttgcatgccattcttgctcaggggcaatattttctgtatcattcaaattttagtgctacaaaagtgagcactcatcatttttacaagttacacacacacactctagtgaagtgttaaacttacgtcatcaatttatcagataaggcagaaaacttgaaatctgacctttctgattcactgattttactgaatgaccttgggccagtcatttaaaccctcagcgttggttttgattaagacagacaagtccattcctcccctagtctgatgtcatagggatgtggttaagaaaacagacaggctctcaacattttgagcccctgagagatgagctactttagagagacactctatggaaagtctagcagataatggtggctgatcagacgtcatacctataccgtttaactatgcagtgagttctgtctgaatgtgacactcttgtatagcaggtgcttcacaaggttctatatgttattttattttattattttattttgagccagagtctcactctgtgagtgccccaggctggagtgcaggggcatgctaacggctcattgcagccttgacctcccgagctcaagcactcctcccacctcagcctcctgagcagctgggactatgtatgtgtgccaccatgcctggctaatttttgggtttttttttttttttttgagacggagtctgactctgtcaccaggctggagtgcagtggcgtgatctcggctcactgcaacctctgtctcccaggttcaagcgattctcctgccacagcctcctgagtagctgggactacaggtgcgcaccaccacgcccagctaatttttatatttttggtagagatggagttttaccatgtcggccaggatggtctggatctcttgacctcgtgatctgcccacctcgacctcccaaagtgctgggattacaggtgtgagccactgtgcccgaccttttttttttttttttgtatttttttgtagaaatggggattcaccatgttgcccaggctgatcttgaactgctgggctcaagtgatctgttcacccgaactcccaaagtgctgggattacaggcatgagagatgacacccagcctgttttaaaaatcatatctttaataaacttatctaaaaggtacagagttggaaaatgggtgtgtcatgtttgtaactatactcatacataaacagcagaattttctgggtttttttttttttttttttgactagtcaagtgaagcagtgggagtggagaaggagaaacaaaatctgtaactggttgtgatcggttacctgtaaacaccactgcacttggaccagccagcagccgaattttcctaataaaagttgacacgcttttttaaaatttggtgacttggtaggaaggaaaactattatttatatttggaaaagaatgttttctttagaaagtacagaagtgttgcttctgtaaatatggagtatttccaagctttaaaaacaggcaccaggccaagttaaagtgtcatatgtaaaccaagcttctgtagtgcagcctttttaaaacacaaggtcaagggcggtgttgtggtttaagtagtgaaaaggccatgggttttagagacatatactccttggatttgcattctggtaaacttcttgactgagcctctgttttgtttcttctaatctatagaataagaataatagtgtgacccctcatgcctgtaatcccagcactttgggaggctgaggcgggtggatcacgaggtcaggagatcgagaccatcctggctaacatggtgaaaccccatctctactaaaaatacaaaaaattagccgggcgtggtggcgggcccctgtagtcccagctactggggaggctgaggcagagaatgttgtgaatccgggaggcggagcttgcagtgaggcgagatcgcgccactgcactccagcctgggtgacaaagcgagactccatctcaaaaaataatagtaataataaagaataaagaataatagtatgacctcctgcctagggtcatattaaatattaaacctcttttctttccttccttccttccttctctctctttcttttccttctttatttctttcttttctttcttccctttctttctttcgtaaccacccaacaggttcacctcgcctgctgcctagatagagccaatttatcaagacaggggattgcaatggagaaagagtaattcactcagagccagctgtgcaggagaccagagttttattattactcaaaccagtctctctgagcattcgggatcggagtttttaaagataatttagcaggtaggggcaggggaagtagggagtgctgactggtcaggttggagatggaatcatagaggagtcaaagcgaggttttcttgctgccttctgttcctgggtgggatcacggaacttgttgagccagattaccggtctgggtggtgtcagctgatccactgagtgcaggctctgcaaaacatctcaagcactgatctttggttttacaatagttttgttatcgcgaagagcaatttagggaggttcagactcttgcagccagaggctgcatggcccctaaaccttaatttctaatcttgtagctaatttgttagtcctacaaagggagactggtccttaggcaagaaggggtctttttggaaaagggccattatcaatttttttcagagtcgaactataagctcaattccttcccaaggttagtttaacctatgcccgggaatgaacaaggacagcttaaaggttagaaacaagatggagtcggttaggtctgatctctttcactgccataattttctcagttacagtttttgcaaaagcagtttcactttctctctgtcttttattttctttttggtaaagagtatttccatagggaattagagggctctggacaccttaccaaatatttagaaaatgaagaggtaaattttagctcagccttggtttatgccttcggtgtagaagccaggaattctttaaggtggtaaaaggagctgtgttttgtgttgtaactttttcctctcttgtgctctcaaactctttgctgtcttctctttctgtgttgccctcttctaattctcctttcctggcatgatccctaacattttgaaaccttctctgaattaattcacttcaccaggtctttcaaatgcccagacatgaataccaacagatatttcttttaaattatagggaatacctctagcctttgtccctaccccatagcaaatatattttagtttcaaatctataaacctttagtcctgaagaaaacactctgaaccatatacaaaatctttaattaaaattctaattttcacccccatgcatattaatagcatgtaggggaggaaaaacttttcttctgccctcctagagtatgtgcctagggtctataaattaaagtgacaaaagacagattaacgggagaaaaaggcatacactttttttgatactatttttaattttacattatcaagggcttcacaacctcctctttgggttttatataccattttgacaaaggacaatatattgcggagaactgcctagacaaaagaaagaggggtttggactcctggggcagtaaattgtaggaaatgtatggtagataaggtttgtttagtaagatcattttgcaagatcatctccttgcagtcttcagtgtttaagagacttctcttcctggctctggagagagaggcacctttacaaatggaaatttcctttacaaaagagaaatttatgctctgcttttaggcagatggggaagggcagagaggtccttttctgtctgttctttctatatagctttcagctcaaaataatccttatatcaaagtgacatattttgatgtgacacagtccaacctcttcaactacgatagttggaaaaacatattcaatttcaataagaatatgaaaggtaaatatatgtttaaatatagtcatggctaaaggcataagcagacatagctatataaagtatttatccccttagttaccactgctttgaagcccagcgagcatacctctttgtacaacatgccctcttttaatttgttttgtttgcctggcgaacatgtgaggattttattgatttacaaaataaacaacagggagctgactgtacttgtacagcaataagggttggcttattggtcattttgaggtcactggcattgacttctacctttatttatttattttttattttattttttatttttttgagatggagtctcactgcactcacccaggctggagtgcagtggcgcgatctcagctcactgcaacctctgcctcctgggttcaggtgattctcctgcctcagcctcctgagtagctgaggcaacaggcgtgtgccaccacacccggctaattttttgtatttttagtagagacggggtttcactgtgttagccaggagggtctcgatctcttgacctcatgatccgcccacctcggcctcccaaagtgctgggattacaggcatgagccaccacacctggccgacttctacctttacttatagcacaatgcttatggtgaaagagccagtgattgacttgtacctacagatcattatatgtttttctgttttgattttctgtctgacagcagcagcgtgcagggtcaaagacagccggccccccatgtcagtggtctaggatggccagtgaaggcaccaacatcccaagtcctgtggtgcgccagattgacaagcagtttctgatttgcagtatatgcctggaacggtacaagaatcccaaggttctcccctgtctgcacactttctgcgagaggtaagcctcctttgtgcttggagaagggagtttcgcaggctgacctcctacaacctactgcaggattctttcccagaattctacagttacctttgagagaaaactaatctcttgtgcttctgccagacattgaaaaacagaatcatgagttgcaaataatttactttatttcaaaccattataagcaagagaaagcaatccagtaactactgattcgtttacacaagagatggagcattaaataagaatgttaagttgaaaaatcttttaaaacttccctttgttctttgtgaaacaatttttgtccacagcagatccctacagagggtctttcagagtcaattaaaaaaatctatcatttcctcccatataacaaatcaggtaaaacatctgcatacatgagttgttacttcaaaaggtatagcttctttttcaaagattcttcagacacatactaatgtcacatttgaatgctatgatgttttagataaagaaaaaatatatattaaataaattacctgactatgtaatttgctgtatgtgaaaacagacttccttatttatcttcttcatagagtatttgtttttggagaggggcgttaatcagttatcaaaatatacttttaccccattgtttaacttaccatgtaagcaattaagcataagtttgttagtaattagtttatcttacttataaatatttccctagtaaagttatgtatctttcttaaaaataaatatggtaattgtgttttatagcattttgttaagtacatttttatcattatttaatatacatacttaaaatgctttacttcctgtgatagaactggaaatcagtatttcaaatggcttcaaatctatgctgattacacaaatatctgatttaacatgtctttattatctgattgaccattttttgagttgatttactttgcaaggttcaattgcaaaagaataaccatatccttcatggtggtgatggatagaaggagaaggtagatttgttactagtagttgtggcttttttgtttgttttgggttgttgtggggttttgtgtgtgtgcgtgtgcttgtgtatatgggttttggtttgttttagtggtggtatatagggcactttttattttattcattttatactttggcttaagtgcttggtaattcatattacaaaataattagagtgtgattcctccatccccttaatgggtgcacctaaaacatgaataccagctaatagtccatgtgtccctgggcacacatgggaagatcgttacctgatgtgcagcagtcggcatagcttggctgatactctctatagaagtgcattcagagccactcagtctgaacttggcagaattgccccatatcccagtattcagtgtccagcctatctattgtttgggtcctacttcctcactctgacaggtgagaagcaacactctggctgccctaggtctgcccctgctatcttctttggggatctagcccaacccacttccactccccacccaatagctggtggtagagatttgtgagattctgctacagcaagtccttacacaatgctctgtgttaaaattgttccagcctcatgcatgttgagatgatttcctcttctttttttattttatttttaattttgagatggagtcgcactctgttgcccaggctggagtgcagtggcgcaaactcagctcactgcaagctctgcctcccggattcacgccattctcctgcctcagcctcctgagtagctaggactacaggtgcctgccaccacgcccagctaattttttgtatttttagtagagacgaggtttcactgtgttagccagaatggtcttgatctcctgacctcatgatctgcccagctcggcctcccaaagtgctgggattacaggcgtgagccactgcgcctggccagatttcctcttcttttattttttattttattaattatttattaatttatttattttgagacaggatctcactctgtcacccagtctagagtgcagtggcacaatcacagttcactgcagcctcaatttcccaggctccagagatcttcccacctcaacttcttgagtagttgggaccacaggtgcacaccaccatgcctgactatagagacagggtttctccatgttgcccaggctggtctcaaactcctgagcgcaagcaatccaactaccttggcctcccaaagtgttgggcttacaggcgtgagccactgcgtccagccgagaagatttctgtttgaaggtgttgaaggtgctggcaactttccttaaaatggggttttttgtttgtttgtttgtttgtttgtttttgagacggagtcttgctctgtcaccaggctggagtgcagtggcgctatctcggctcaccgcaacttccgcctcctgggttaagtgattctcctgcctcagcctcccgagtagctgggactacaggcatgcgccactatgcccagctaatttttgtatttttagtagagacggggtttcgccatgttggccaggatggtctcgatctcttgacctcgtgatctgcccatgtcggcctcccaaagagcagggattacaggcatgagtcactgcgcccggtggggaaatttttgtttatgcagagacaaaactttacagcttgtctcactgtcaggagagtgagctctaggacccccatgttcagcctctgctggacattcatactggctactcagtgagcaccttacagtcactctttttttttttttttttttttttgagacagagtctcgctctgccgcccgggctggagtgccgtggcgcgatctcggctcactgcaagctccacctcccgggttcacgccattctcctgcctcagcctcccgagtagctgggactacaggcgcccgccaccacgcccggctaattttttttttttttttttttttttgtatttttagtagaaacggggtttcaccgtgttagccaggatggtctcgatctcctgccctcgtgatccacccgccttggcctcccagagtgctggcattacaggcgtgagccaccacgcccagcccttacagtcactcttatcccacatcttccaaaacagcatcaaaaggcttgaaggagagcaaagccagacatagctgctggccccttggaactcacagcctagtggaggagccagtcactaaccccctaattgctcagactaatgtgaaattaaaccagtgacaagtgctgtacaccagaagtatacaggaaacaatataatagaggaatttgccctaatctgggaaggcttccttgcagaagtgatgattacgcagaaaccccaatgatgagtaaaaattaactaaacaaaggggagtgaatagaatttcaggtatgtgcaaaggtgctatagtgggaggttgctatagtgagtgagaggtgctacagtgagagggttattcaacactgaggaagaacttaaataagtccactgtggctggtatgcagcaaatgaggggaagagacagaaagtatgtaggtgctaggccatatgagatgtgtaatccatgttgccatatatggatttttgtctttgttgtaagagcagtggaagtggaaaccatggcatggctttcatctcagatggtgtgggagggagatttaaatggctctctttgagttttgagaaggtcactctggttgcaatgtggataattgttagagggtacaaggatggttatatagcagggcatgaagagaactggagaggttagaaagatatgtaggcatttggacatgctttggtgatgggttggatatggaaaatgaaggacagtaagggagttactgttttaagaatgactcctagtttctggtttgtttaaataaatggatggaggtgctattcatcaggaatgggagaggatacagtctggggttcagataatgggtttggttttgttcatgttgagttttaggacctgcaagacatctaagaaaagatgtcaacaggtcagttaatgaggctcaaaggagatgtctgtgggaagaaatataattttgggagcctgatgcttgtagccacacctgtgatatgaatataatattccagaaagagaagaggtctcatgatgaatggaaccttgattaactcaaaactgtattgactcagaaaagacagagcagacaggagaaccatgtgagtgtggtgtcataaagtcaagggaagagaaatttttcaataaaaaggaaggtgagcagagcaataatcaagcttaatgatacttcccagaagtctagtaagataaaattgaaaaacatctgctggattcagacgtcgttaatgaccttagcaaaagctgtttcatgtctggtattggttcagggctagctacctctgtgacatagacaagatcagtgaatgtctctgatgtcaggtctattcatctgcaaaataaggggaatggggctaggttggtgtgttttgaattgtttggctaggtactggaaaaaattgtatagtctaattattgagagcttagattatggtgccaaactgcctgtgtttgaatttgtactttgtactctgctcctgaccagctaagtatcttggacaagtacgctggcctgtctctgtctgttgcatcacgtgtctcaaggaatcataacagtacctatctcataggctcattggaagtactttgaattcaatgagcagcatatgtgtgagtcattattagtgacacacttctttaactaaatgagttaagttgatacctgttgagtagagacaaggagaagagatggtgtggctctgactctgggtgtcccattcttgcttcaagcaaatatttccactttgatgtgttttttatatctcattatgattttgtacgtaagaagaattttattgctaacaaaaatatttgatgtgtttctttcaatttcaaagtccacacatttatgagcccactgctagatattgtgggccagtgcttctcaaactttaacatgtatgcaaatcacatggggagctgactcagcaggtgttcgatagggtctaagattctgcatttctaccaaatgcaccccccagggaggctgacgctgctcatccatggaccacactttgtgtgccaaggcactagaaaacactacaaaagtcaatgacattttttatttccttgagcataatcatttgcctcattagtgtgagtacagcttacctgttggtttctgaaatattattttcctagtaaaggagactgggatgggagtttctgccaaataccttgtgtagtcactgagaacatgtatggtacctgtgagaagtggaggttctgcactgtgctaagctctccacctctgcttctgcaacaggtgcctgcagaactacattcctgcccacagtttaaccctctcctgcccagtgtgccgccagacctccatcctgcccgagaaaggggtggccgcgctccagaacaatttcttcatcacaaacctgatggacgtgctgcagcgaactccaggcagcaacgctgaggagtcttccatcctggagacagtcactgctgtggctgcgggaaagcctctctcttgcccaaaccacgatgggaatgtaagtggctgggatggcagatactgcccgggagcatgactactgtggccttggggaggctttgggtacatcagagattacagattgaaacagaactccatgtggaaaaatcagtaattaaaaaagatttttaccagccctcagactacctgctcactttctttgaccagaactatttaaataacgaaatcaatctccactgtgtctccttcacacatattgttggtatccccaggacagcaaaccagtagctatttgcaagctgacctacataaacatctgtgtaataaatttatggatacggatttaacaatggataagttctgtaagttgagaatgattattaaaatgttaattagagttctttatttttcttgggagggaaattttctcatgctacattagaccttattccttattaatagatagaatttgaagctatgtgaatccctgatagtagattatagattatgaattccaaacatatttcttgctactagtgagtacaataactgttagaagctcaggaggacctgtgggtaccatcaagtaactgattcacaatagctatgtaacctgaagaggcagcattgtgtagcgtctaaggacattggctttggagtcaggctgcctgattcaaatcctgctcttaaacttattccctgtgccagctttggtaagtttattaaactctctgcgtctcatttctttatcagttaaaaaaaagtaataatagtatttaccatatagaatattggaagaattaaatgttcaagtcatgtaaatcatatagtaggatcttgataaatgtcagctttaacattttttcattaattactttatattcatctcatttgtatattggtcacttcaaaagtatttgaaactgcttaaaacaaaaggcccaggtataacaaaaccactaagacaagcaagcaatcattagagcaaagcaattcttattagccacactactgtttgtttacctcatctcccagcattctctctgcacactgtgctggagcctcaccagcctcctagaacctgccaaatggtttccctcctcggggcctggctgttctgttccttctgcctgggttgctctttgtttcctctttatgtggcgagcttattctcttccttgaagtctcactgcaaatttctcctgcacacagcagtcttctccacctgtaccgtctaacacaggttgcctcttacagctggttaccctccatcatgtccctgctttctttcctccctggtgctcactgtggtctgcttgccatcagctgtgtatttgtgtacttattagtcctggctttccctctagaatgtgagctctgggagggcaaggacctgtcattagacccctagcactgagggcagtgtcttatacatagaagtcaataaatatttgttgaacaaatttgccagacaccgtatttggctccttaaacccccctctgcaaagtagttgttggttactttcactttataagatgaagaaactgaggctgaaacagtttaagtcacaaagcttgctgggcacattgtaaaagctagccctggaagaaatagcatcctgagctttctggtagccaaaacaagagaaggacaccatggcttacacatctgtaataatttaattgaaagcacaccaggctattaatagctatcagttttccatgcattttatgccaagggaaattgatcatctaaattttgtaaaaagaacttttaaatgctgcttttgaaagcaggttgagtattttcctcatgaccacttctcacactggtgcttagtgaatgctgaggctgtctatgcctggagcttgcactctaaatactagttatgggaaggtatttctatcaggtgtaagagtgccccttaaaatgaggctctctggagacgtgacttgatagaggagtaaagtcttagaaacattaggttgttttattttttatgggttttttagtttttgtttttgtttctgagacagagtctcaatctgtcatccaggctggagtgcagtggcacgatcatggctcactgaagcctcgacctcctggcttaagcgatctttccacctcagtcctgtcctctgccccagtatctgggactacaggtgcatgccaccacgcccagctaatttttgtattttctgtagagacagggtctcactatgttgccaagactggtctcaaactcctggtcccaagtgattcacctgccttggcctcccaaagtgctgaaattacaggtatgcgccactgtgcccagccaagctaatatttctaactgtcattatttctcattctacatgacagccccttcatatcccaaatttacaccagtgtctatagtaggtctcctaatgtttctaagggccagacatggtggctcatgcctgtaatcccagcactttgggaggctgaggcaagccaatcgcttgagcccaggagtttgagacctgactgggcaacatggcgaaatcccacctctaccaaaaatacaaaaatcagctgggcatgatggggctgcacctgtagtcccagctgttcagaggctgaggtaggaggatcctgtgggtccagacattgaggcttcagtgagccatgattgcgcctctgcgctccaacccaggtgacagagcaagactctatctcaaaaaaaaaaaaaaaaattaagaaaaaaaaaataaatgttacctccataagtaaagtgagaatgtcatgaaattcaggcaacagcttatagctcaaggaagcggctagaacatggagacagcggagttgagggtgggacacaggtgggcctgaaaagatagatgtggagagattgggatgagctgtgaatatcattaagaacatgtttgacgtcaatttcttaaattgcaaaagcatcaaagccttctgaacaggagataggtattttattgacattttggaggaatggggtggcagacactaaaggctgggaaaccaattatgagtttactgaattgtccaaatgagagataagagatggaactagaatggcatcaatgggcctggggaagacagcgtgaatttcagagaaaagagtactctttgactcaacaatctgcctcccacaaataaaaaggcctgtgctaaagtctgttaagctaagctattagatcgtgagaacttcagcaactaaaattaatcttatactaggtcacaaagaaaataccactatattttcccattgtgtaaagcaagttcctgccctacaatgcactaaaattacattagtaacacatgtttatggggaaaaaacaaatctcctttaaaagttaataattatttaatcaatagaaaataatagaaataatagaaaattggactatttacaaagtattggaagtggaaactttttatatccaatgtgtagggtcaaatctctacccaggaaattttataggtttaagtattttcctttatttaaaaagaattccagcctgggcaacatagtgagtcctcatctctacaaaaaaatcaaaacatgaggccgagcacagtggctcatacctataatctcagcactttgggaggccgagacaggtggatcacctgaggtcaggagttcgagaccagcctggccaacatggtaaaactctgtctctattaaaaatacaaaaattagctgggcatggtggcacatgactgtagtcgcagctactcaggaggctgaggcaggagaattatttgaacctgggaagcagagattgcaatgagccaagattgtgccactgcactccagcttgggcaacagagtgagactctgtctcaaaaaaaaaaaaaaaaagcagggggggatagtggagcaagaggattgcttgagcccagaaggttgaggcagcaatgagctgtgatcgtgccaaagtactcctgcttgggtgataaagcgagaccctgcccctacccccacccaccccccaaaaaaagaattcaactcaagttagaaaaagagtaataaaataaacatatggaacatacacaaagaaagaaaagaacagaaatatctacacatagtatagtaagtttattaaatacatagtatatatatttctgcattgtaggaaaagctagaaaggtctcccatttcatttgtgatacgcttataaccctgataccaaaacctaatgaagatagaacaaaaagaaaatcattagtagcttaattaatgacattggctgtaaaattattaattaaaataccccagcaaattccttttttttttttttttgctgggtctcactctgtcaccaaggctagagtgcaagtggcactatctatcatggttcactgtaacctccaactccagggctcaagtgatacccctgtctcagcctccagagtagctgggactacaggaacatgctaccatgcctggctaattctttaagtttttgttgagaaaaggtcttatgttgcccaggctggttgcaaactggcctcaagggatcctcccatctggacctcccaaagtgctaggattacaggcatgagccactatgtccagcccaccagcaaattctttttttttttgagacggagtctcgctctgttgcccaggctggagtgcagcggcacgatcttggctgactacaagctctgcctcccgggttcacaccattctcctgcctcagccgcccgagtagctgggactacagatgcccgccaccaaacttggctaattttttgtgtttttagtagagatggggtttcaccatgttagccaggatggtctcgatctcctgacctcgtgatctgcccgcctcggcctcccaaagtgctgggattacaggtgtgagccaccgcgcccagcctgcaaattcttaatatgtaaaagcacttacaaattaagaaaaatatgagcatcataaaagaaaatgagcaaataactcagaaaatccacagaggatatataaatgcctaaaaatcatttatggaaaaatgtcaagcttcacagataatcagttcttttcaaattaactacaaattttttaaaaggtagtaaccagcgctcttgagagtatgtatggtgagacattttcatatgctgtgggtggaagggtaaattgctcttcagaaagtttacgtcaatttgacaaaatataatgagtgttttatacagcctctcatcttttaatccagtaattccaccagtggaaatatttctaaggaaatagctagagcggaagataaagctcaaaaattggaaataatctaaatgtgcaacattagggggcaagaatgcttggcaaattagcagcatgtgccttaaatcattctattgtttgattatagattgtagaagttcactgctgctgttttgaaacagaagtcttcattgcatattcaagccaaattcatgcaatgttccagataaattgctgcagttagttgctgtgagtagatctttaaaaacaatccaagcatctgaaggttaataaaatcaattcattaacaataaagcagggtgctgccatccccactgtctgatgctgattggcacgtgtggatgaaagcctgtcatcaactttaagtgctgtgacactatctgtcttctaattaaactgccatggtggcattgttcaaatacaaaagaaaaagaaaaataatggtcagtgatctaacaggttctttgcacttaaagcagacacttgagctcatgcctcatggtccctggaacacaaatgatcattaaaccctgttattggttgcttaggcacctgactatcaagggtgtcaaaggtgcaaaggagaggtcctcattaagactgccctgccactaacaagtttccacttccatatcaggatcaactgtcagtgcccttaagaagccaagcctcagggttggctgcaagaccttgaccatcttttttgcatgttaggaatgcataggatcctgccagtctcttctggtgaacataaatggtgactatccatcaacaacaagctcatcctagcttttggcctgcccacccaccccaggccgcaccagcatcatctcactggagatggatgaaatggatgagctcagcagaattacacgccccacacaattagctctcagcttaaaccaaagctgtcagaaccgaagcacgagcctttgaaaatgactagctattgataattcaaaatcatttcagggccttggcttcccaagacacacttaagatattgaactaggaataataagccaggtctgctgctgtctcttcaaagctgagatcaatttttgtttgtttgtttctgaagtaaaattcaggctgggcttggtggctcactttgggaggccaaggcaggaggatcacttgaggccaggagtttgagacatgcctgagcaacaaagtgagaccctttctctacaaaagtaaataaatacataaatacaagataaaaaataaaattcacatcacataaaatttaatatttcaacaattttatttgtttgtttgtttttttgttttgagacaggatctcactctgtcacccaggctagtctcaaattcctgggcttaagcaatctgcctgcctcaacttcccagagtgctgggattacaggtgttaaggcaccgagcctggcctgttttttttgtttttctttttataatgatgttttttatttttaattttttttttggagacaaaaaagtctcactctgtcacccaggctggagtgcagtggcatgatcatggctcatggcagcctcaatctcctaggctcaagtgatcctcccacttcagcctcccgagtaactgggactataggcgcatgccaccaacctagctaattttttttttaagagataggttttgctatgttgcccaggctggtctccaactcctaggctcaaaggatcctcctgcctggacctcccaaagtgctgggattacaggagtgagccactgcaccaggtctcaaccatttggaaaagcacaactaatgtggtttttagtatagtcacaaagttgagcaaacatcaccactgtctaaatttcagaacgtattcatcaccccaaaaagaaactccatgccctttaagcagtcacctcctactccctcctcccactaatccctggcaaccatcagcctgcattctgtctctggatttgccacttacggacatttgatataaatggaatcatacaatatgtgagttttagagtctggcttccatcaattagcatgttttcaaggttcatccatgttatggtatattagtactctttttaatggctaaataatattccattatatagatataccacaatttatcgattcattcatcagttgatggacatttgagttgtttccactttttggctgttatgaataatgctgctgtgaacattcatgtacatgtttttgtgtagacatatgctttcagttgtcctgggtatgtacctaaaagtggaattgctagaccatatgataattccatgtttaactttttaaggaaccgtcaactgttttttttctttttttttttttttgagacagagttgctcttttgccaggctggagtgcagtggcggaaacttggctcactgcaacttctgcctcccaggttcaagcaattcccttgcctcagcctcccaagtagctgggactacaggtgcatgccaccacgccccgtgaattttttgtatttttagtagagacggggtttcatcatcttggccaggatggccttgatctttttttttttttttttttttttttttgagacagagacttgctctgctgcccaggctggaatgcagtggtgcaatctcagctcactgcagcctctcctcctgggttcaagcaattctcctgcctcagcctcctgagtagctgggattacaggtgcatgtcaccatgcccagctaatttttgtatttttttttttttaagtagagatggggtttcaccatgttggccaggcaggtctcaaactcctgacctcaggtgatccgcccacttcggcctcccaaagtgctgggattacaggcataagccattgcgcctggcctggttttttttgttttgttttttgttttttggtttttttttagacagagtctcactctgttgcccaggctggagtgcagtgacgtgatcttggtttactccaacctctgcctcctgggttcgagtgattctcctgcctcagcctcctgagtagctggcattacaggcgcccaccaccatgcctggctaatttttttgtatttttagtagagatggggtttccgctgtgttggccaggctggtcttgaattcctggcctcaagtgatctgccagccttggcctcccaaagtgctgggattacaggcatgagccaccatgcctggcctggaaccaccaactgttttcacagtggctgcaccagtttacatttccactagcaaagcataagggttctaatttctcagcatctttaccaacccttattattatttgactttttcatcctgacttttgattctagtgagtatgcagtgatatcttgttgcggttttgatttgcatttgccaaatgattaacaatgtggatcatattttcatgtgctaattgaccatttgtatatcttctttggagaaagtctattcaagttctttgcccgtttttgaattgcgttgtttatctttttgttgttgagttgtagaatttttaatatgttctggattattatacccttatcagatatatgactagccatattttctcccattttgtggggtttcttttcactttcttattagtgtcctttgattcaaaaatacttttaatttaatgaagcctaatttctctatttttttcttttgttgcttgtgcttttggtgtcatagcttagaatccattgctgattcaaggtcatgaaaattcacccctgtttccttctaagatttttatagttttagcttacatttaggtcttttatgtatcttgagttaatttttgtatgtggtttgaaggaagggttaaatttcattcttgtacatgtgaatttctagttacctcagcataatatgttgaaaaggcaatttttcccattgagctgtgttgacacccttgtcaagaatcaattgaccatggatgtatgggcttctttctgtactttccatcttattccattgatctatatgcctattctcatgccagtactacattgttttgattactgtagcattatagtcagttttgaaattggtaactatgagtcctccaattttgttctttttcaagattgttttggctatttagtagttttcagtattcaagtcttgcacttccttggttcaatttattcccaactatgttatattctttttgataatattgtaaatggatttttttaaaaaaatagagataggtctcactattttggccagcctggtcttggggcaagcaatcctcctgcctcagcctcccaaagtcctgggattacaggcatgagccaccatgcctagctgggaattgttttcttaatttcacttttggattattcattgttagtgtttagagatacaactgatttttgtttgttaatcttgtatcctgcaactttgctgaattcatttattagctctaattgtgtgaatgtgtgtgcgtgtgtgtgtgtgtgtgtgtattctttaggattttctgtatataagatcatgtcatctctgtatagagaaattcttaattcttcctttccaatttggatgcattttatttctttttcttgcctaaatgccctggtcagcaccttcagtacaccgttgactagaagtgataagagtgaatatcctcttgttcttgattaagtatgatgttagctgtgggttttttgtagatgctctttattaggaggaggaagttcccttctgtttctagtttggcatgaaaagatattggattttgttaaatgcttttcccacattaattcagatgataatgagttttttctttcattctattaatgtgatgtattacatacagtaatttgtctaggtaagccacccttgcattcctgggataaatcccacctgctcatgatatataatctctttaatatacagctggattcagtttgctagcattttattaagaattttttcatccatatttataagggttattggtctgtaattttcttgtggtatctttggctttggtatcagggaaatactggcctaatagaatgagttaggaagtattacccctcaatctcttctatttttttttaagagtttaaggaagattggtgttagttcttcttaaaatatttggttgaattcaccagtgaagccatctggtcctgggcttttctgtgttggaagtttcctgattattgattcaatctccttacatattacaggtctattcagactttgtatttcttcatgtcagttttgatagtttgtgtgtttttaggaatttgtccatttcatctaagttattcaatgtgttagcataaaactatccacagtattctgttataatcctttttatttctatgatgtcagtagtaatttccccaccactttccttcctgatttttgtaatttgagtcttctttctctcttctcccacaccacccctgccacacacacacacccaccaccccgcacccccccaccatctcactctctctctctctctggtcagtctaactaaagttttatcaattttataatatcctttctgtcaattatatactatccaacttttgtcttaagtctattttttctgatattagaatagccactctagctcccttttggttacagtttgcatgaaatatttttttcattctttcactttcttttttttcttttcctttttctctctctctttttttaagagatggtcttgctctgtttcccaggctggagtacagtggcatgatcatagctcactgcagcctcataatcttgggttcaattgatattcctgcctcagcctcctgaaggccaggactacaggcacacgccactatgctcagctaatttttgtatttttttaatagacagggtctctcactatgtttttcaagctggtcttgacctcctggactcaagcaatcctcctgcctctgtctcccaaagtactgggattacaggcatgagccaccatatctgggccatcctgtcactttcaacctatttgagtctctgaatctaaaattagtctcttatagagagcatatagttggattatgttttcaatccaatctgccagtatcagccctttgattggagagtttaatccatttaaattaattaacttaattactgaaaagaaaggctttctttccttttgccatttactattctttttctgtatggcatatctttttgttcctctattcctccattactgccttcttttatgtttaatagatattttctagtgaaccattttgattcccttctcatttcttttactatacatatttttatttttctttattgtttgccctgagggttataattaacattttagcttataatgatttaattcaaattaataccaacataatttcaatagtatgtaaaatccttgcttcttttagcttgtatttatatgttgtatgctcagctacataggtttgtaattatagattatgctgttttatgcagttttattttatgtcatgtaggagttagaaaactaaaatacattaatactgacctttatatttatctgtgtagttacctttacctgctttccttgtttttttcatgtggacccaggttactttgtagtgtatcaaatcaggtcagcttgcaggaatccctttggcatgacttgtagggaaggtatactagcaacagacactcagtttttgtatttctggtaatgtgttaatttttccttcatgtttgaaggatagttttgccagataaaaaattattagttgtcaggtttatttttttttcagcagtttgaatatattaccccattgatttctggcctctatagtttctgatgagatatctgctattaaaaaatctgcagccgggcatggtggctcgcacctgtaatcccaataatttgggaggctgaggcaggcggatcacctgaggtcaggagtttgagaccagcctggccaacatggtgaaaccttgtctctactaaaaatacaaaaattagccagggatggtggcgcgcacctgtaatcccagctactcaggaggctgagacaggagaatcgcttgaacttgggagccagaggttgcagtgagccaagattgagccactgcactccagcctgggtgacagagtgagactcatcttagaaaaaagaaaaaaaatctgcttatggaatatttcttatacaagatgagtcacctctgtcttgctgctttcaagattctctctttgtttttgtctttttatggtttggttatactgtttcctggtttggatgtctttgagtttcctgtttggagtttattaagttttttggatgtgtagatttgtgtcttttatcaaatttgggaagtttccagccattacttttgcaaatatcggttctttccctttctctcttcctctcctctgggactctcattaggtatatttggtacacttgatggtgtcccacgggcctcttaggttttgttactttttcttccttttttttttttcctgcctcacagactgtataatctcaataggcccatcttcaagttaaccttcttcttcctgcttgaattttctgtggaacttttctagtgaatttttcattgcagttatattttttaaccctacaatatttctatttggcttttaaaaaataattcttatctctctattaatattctccatttagtgagacattgttctcatagttttttatatatggtttccattagctctgtgagcatatatgaaagagttaaagtcaagtaagtccaatctgggcttctttagggagagtgcctataaatttcttttattcctctttgtgaactttgtccttttttgtgtgcttcacttttttccattggaaactgaacatttaaagtactatattgtggcaactctggaaatcagagtctcccctctccctagggttttttgttgatgattattatagttttttgctgttgttgtttggtgacttttctaaactaattattttatatttttttcgttccccacttttattatccaatgcaactaattttgtaaagtttgtatgttttgtcatatgtggctaatgaagtctgttccagtagattagctaccaaccagtgacctgacatagattttcttatgctgctgttttcagtaacatcacttccctgtaatcatttaaaaatatgaattaaaaagaaggataataatagtaatggatgctgatcttttttcatacatgatgaactctggtcttgaggattttttacatttttcgcgactctatattattttgcatccttttctgtcttccaatgagtattctttgtcatctcgtttcttatactgctggggaacttcaactcagaccacaaaatgcaacaaatatgatatagtatttgcaacttctaaatgcaatgtgcacactgattcccaagtaaaatttgccattgatctagacccattctagacatgaggccatgctcccttcttccagtgaagatgtgggaactcagtcccaggctagattggtttgggaagagtgccattggattgactaagcactgttaatgtggcatattccctcagtccatacacttatatttgccccaacacccgaaataacctgagggaagaagtcttttcacattctgtttttgggctgtcctctggtacatgtgactggcagtgacaacctgctttaaagagacctcctgagcactgaccatgaagatgaaatattagtaaatgctattctagttatatataatctagaaataaaatgtctggtaaaagtaaaccacctctggctgaagccatgaagtaataaagaagctcagccttgataggaattatgtttcacaaaccccaggggatgaaatttttccaaagaaatctcagaatttagtggggaatgctcatttatcctgccttctgccagccctttgaaaaacaggaaacttcttggattaagaatttttttctaataacaagtaaaatatttatgatatgaggcttatatattgttaccaagcatttgctgacactgcgtatagttttagatcgttctatttcctgaacacatgaaggaaagcaatatggtaaaatacacaaatgcaacccaaagtatagtcttccctcactggggaaatcccttggaagtaccccttagctcatattgcccctcagcgaataattattgaacagcttctataagctgtgctttctgctggattgtatcagacttgtaccaaaataaggtgcaaatgaccagtattatagtctttctgtgggatatttgaattttcatttgagtttattaaaacatattttaatgagaagtgtgaatacttttttgctttttgaaataggatcttgctccgatacccaggctggagtgcagtggcacaatcatggctcactgcaacctcgaactccgaagctcaagcaatcctcccacctcagcctcccaagtagctgggactacaggcatgtgccaccacgtccagttaattttttaaatttttttctagagacagagctttgctgtggttccccggctggtctcaaacccctggcctcaagtgatcctcccaccttggccttccaaagtgctgggattacaggtgtgagccactgcacccagctgagaaatgtttttgagcagagaatgcatacaagaaatttccagttaatgtttcaagcctattcctaaaaggcctgcagaggagcaaagtacatgaaattacagccttatatgacaaaaaaaaaagtgtctttatatgacaaaaaaaaagtgtctttctaaacctcttactatgtacctacttgaaactatgataaatatgaaatttaaaattatcttggacatggtttgaatgacttttatctgaatttggttcaccagaaaaggttttttccaaaacacatgtagtatgagcaagctgagtgctttattcctaggagaatcttctccagaaagcactatgtaacatagtgagtcttaatgaggaaggaggtgtcccttggttggtcttacacatgccacccgaatcatggctaagagcctcctctcatttattcattcagtagtgttattgaatacctactaaatgtatggtattatctaggctctgggtgggagagttcctgggcttaggaatttaaaatcttttatttcataaattgggtataaataaaagtgatttggtgactgccttcactttgtgaaaatccatcaagctgcattaagatttatgcccttttctgtattgtgttatatgtcaagaaaaagttcctcctaaaagtgctttgggaattgaaaactggaagacattatttccagctgagaaaacaaggtaatacctctgcaaggaagctaattttctggctttatattatattgttactgaaagttcgtcattgtcagggtcatatttttttattttcaggtaagcagatgatgtcatcatcatcatcatcatcatccccacagcagctactacatattaagaacttattatgtaccaaagccaggtgccatctgagttcttcgtgcatactaacctacttattcttcatagtagccctgtgaagtaggttactgttactatctccatttgacagagacagaagttgtgacacagtgaggctgaaaatttgtccaaggtcattcagctaaataagtggtgaagccaggagacaaactgctcagtccagacttcttatttggataagtctcttagccaaacagtagcagttctcaaagtgtggtccaggaacccttgtgggtcccaagacgttttcaagcagtcttcaaggtcaatactatattcataatcatatgaagacattatttgcttttttcactctcgttctctcaagagtgcacagtggaattttccacaggctatgtgatgtatgctatcacaatggactcaatgcagaagtggatacaagtctccagccatcttctgttaagccagacgctgcagatatttacaaaaatggaaaacaataccatttttcccacaaatttttttgtttttcacaatatatttattttcataaattacattattcacattaacatttaatgggcttattactgcttttaataaattaaatactttaaaatttttatccgttctaatttttaaaaatttgattaaatactaattttaaaattttttgtagagacagagtctcgctatgtttcccaggctggtcttaactcctggcctcgagtaatcctccagccttggcctcccaaagtgctgggattataggcatacgccactgcacccagcctagtttcaatttttaatataagaaatatctataaatataacccacatacacgaaagctcttttggagtcctcaataatttttaaagattataacggggtcctgatataaaaatgtttgagcaccacagccctatactgtactgccttggggcagtggatacccaaaagctggttttatggttatagaagcagcttagaagtcagctccatttctgagacctgtcacataaaaatgtgtccttccttttctcctgtgaagctggacttaataatgctgacattctggggtggctctcatttaattatgagagactgcaaggcaagtgcttagtgtagagtaagccctcaacccatggcccagaaccaggaacttttcttgtgtcatccacaggtgatggaattttactgccagtcctgtgagactgccatgtgtcgggagtgcacggagggggagcacgcagagcaccccacagttccactcaaggatgtggtggaacagcacaaggcctcgctccaggtccagctggatgctgtcaacaaaaggtgggggacccctccccaaacccccaactggctgcctgtacttgaggcctggcctcatggcctcttgtctaggtacaagagtaggttcatatttcccttgagatatcaggctttgtgggtaaataagttcttttatcatggatttgttgtcataaactaatgagtgaggaaggttgtcttctgcctgttggtagaactccagcctccttatgagtggcatttttgttttagtacctaagtatgattacatgaattaaagtacactcaaataaactgctctcaggagagttctgaaattcatccctgaaaccaggctctctgaggagccttccttatctgctgttcctgacacacatacaggccattttgttggctgtgattggctcctttctgtctgagctctgcaaaatggtcttgagcagtgattgctaattttccttgttttcctgcttccaagttccttctttggcacagaaatgaaagaacagagtagctgagtggtgcatgaaaaagaccaaagagaggaaatgagaagccagcagaaaagcagacaaaataaatctctccactgatagctgtagtgagaaaagtgtggttgttctatagtaattcaaagaacttggaaacttacgagaagttctcaagaaactgggtttggataaatgttttatgtggctagggtaaaagatacagctatctagaatagtggttctcagccattcggcaatgcctggagacatttttggtatcacaactgtgtgttttggcagggggttggggagagggaggcagggcggggagagctattggtatctggtagaggacaggctgctgttaaacatcatacaatgcaccagacggcccctgcaacgaagaattaacctggccagaatggcttttcagagagcttcaagtctatacacttaattaattattaaaattggacaattgatggtagattgaaattgacaattttgattgtctctgaagagacaaaatctcttctctctaaggcagtaattatgtcatatcttattctgttctctggttattgtttttttaaagatgatgaaaggcatagaatttttttaaacaaaatgtagtgtttagatagattttggaatatttctgggttgaggttaaataacgacctttaacaactgtccaccaggctcccagaaatagattctgctcttcagttcatctctgaaatcattcatcagttaaccaaccaaaaggccagcatcgtggatgacattcattccacctttgatgagctccagaagactttaaatgtgcgcaagagtgtgctgcttatggaattggaggtcaactatggcctcaaacacaaagtaagaccagaatcattacagatgtcctggaagagacatgatatccaagggcactagcttattgtttcctaatagcaacaaggggtccttaagtgtcatcattgtatagtaaactatagttttcactgaatgtaatatccagctattttttcccctattttcagcaaaattcgatgactctgtgactttaagtactagtttataatttgacaagaggcaaggttgaatataatgtaatgcttttagcatttagagttaaactggattgttttcattcctcagttataacatgaaatagtttcttaattgctctctcacccacaccaacctgttagtcagcttcaaaatgaaccctgactgcagcctttgtttaactctgcatgtctgttcacaaaacagggatgagaaacctctgatgttcaggtgtggagagttttcatttgtttacttcctgttcctttaggtggtgatggacatggggacatggggaaagatactgaataatgaatatttcagatgtcaggcatagcaattaatttgctatgctcttggtagtgacctttctgttttcccctctccaaaacacatgagccaagaaatacatgtgtggaagagagggcgaggcggaagggaaacctcgaaaaggtactgggaatgcagtttaggactttgcgttagcactgggttccctgggttgacaaacaccgcttgctcagagccacctgcgtgggcaggtgtagagtctccttctcgccggtggagggcactgccccgggctaggccccgccctgtgggacgagctcaccaggcctccggttttcccgcaggtcctccagtcgcagctggatactctgctccaggggcaggagagcattaagagctgcagcaacttcacagcgcaggccctcaaccatggcacggagaccgaggtcctactggtgaagaagcagatgagcgagaagctgaacgagctggccgaccaggacttccccttgcacccgcgggagaacgaccagctggatttcatcgtggaaaccgaggggctgaagaagtccatccacaacctcgggacgatcttaaccaccaacgccgttgcctcagagacagtggccacgggcgaggggctgcggcagaccatcatcgggcagcccatgtccgtcaccatcaccaccaaggacaaagacggtgagctgtgcaaaaccggcaacgcctacctcaccgccgaactgagcacccccgacgggagcgtggcagacggggagatcctggacaacaagaacggcacctatgagtttttgtacactgtccagaaggaaggggactttaccctgtctctgagactctatgaccagcacatccgaggcagcccgtttaagctgaaagtgatccgatccgctgatgtgtctcccaccacagaaggcgtgaagaggcgcgttaagtccccggggagcggccacgtcaagcagaaagctgtgaaaagacccgcaagcatgtacagcactggaaaacgaaaagagaatcccatcgaagacgatttgatctttcgagtgggtaaggagagggcttctgtgcccgacgcctgagctggcactggttaaggggtaactgggcacgtgtcattgcaaatagcaacactgcagcccagaactctacctgcaggtgttaggagatgtactgctataaaatttgatatattttgttagtcgagcttatgcagtctcctccagagatggtatttccttctcctccgcctctagtctcctccctactccctcctttctcttcttcctcttccttaagacacaagtgctgcatattcattgtaggaaattacaagctgaaaataagcaaaaagagaaatagaaaaatcatagcacccgtaatctgaaaatcttgaaggaaaaattggcaatcctccccctaacccccaccaccaacgcccctcttccctgggagggtcttcttgtgccagagctgaggctgtacggttggcagagcatgtgatgcctccctgtcactgcatcggcattgcaggagggaggggatgtgtgcattgcaagttgcaaccacctccagctgtgtgtagctggagagcagccccaaggagaggaggaggggtggaaacttggagaaagaatggggttgaggcggggttggggtggaagcaagaaggtacccgatgagccaagagagttaggaatgcaaatagcccttccctcctctgatttatggtctctctctttttaaactttctatgttctcagtagaaagcaactaaatgtaaacagcaaagggcttgatgattcttaagggagaaaagtctgcattttagttagcttcaaaaagtagctccagcagacttcttttcctccctcttccatttaacaatgcagtatctctgaaagagtgctgcactgtatattagctggcacatgtagaaaaacaattctatggttcagataaatttgggaaaccttaggctaaatgaaggaagtggacttttttaaattgcagaacttcttaaaacctttagaatctgctgatgtacattgtaggtctctgaggcaggagagggatagataacaggcagcacatccaaacttccaaccatagaactttttccctggaacgtcttgggaaatgaaggctctgtggaacgttcttgggcagagctgctcaatgttaatgcttcaggctgaatcttcgcaaagacggtgatatgatatgtaacttgtctgttcagagcatggaagccctcatacattcacggccagatgtgcgatatgggtgcaggggttgttgattctccaccagagcagagtggacgagcttgggtggatgcaggactgggaggcgcccaggtctgccactccggttcagccacttacttgagccttgggcaaatctttcagcttccctgtacttcaacttctatgtccatgaaatgaaaatgcaaaaatatctgcttatcagaactattctaagttccaagctgaatgcctgacatgtaggaggagctaaatgaatgagagctattgtttttgtacatgtaattgttaaggcttttagattatccctactaccttttcttttcaaaaaacctgctggctccccactgatctcttgcattacgaacaaattcattttcccatttaaacctccatcccccacacctcccaccaagtgaccccagtctactcccctaggccatgtgcagtgaaagactcagaactggaattgggcagatctgggttggaatcttgattcttctcaccagctgggcaactggcttacttaccctttttgaacagtgttttctcctctgtaaaacaaagggaatgaaatattacctaaatcttaaggttgctgttgggggtgaaatgagagaattcttgtaatatacgtggcatgtgcctgtgtacagcaagagctcaattaatggtagctaagattttactcttgttattcatcatcatcatcatcataatcatcatcacctctgatacccacttgaggaaagagacatgtctttcaggagtttcctgtgctcaaactatattggttttgattctccagatcccaccccagggacaagggggtatatcttctcccctcgtacctactgagaaatgcagccatagtgatgtattggcactgctggaaaggtgttgaaatgtgtaaacatttgtgaagaacttagaacagtgcctggcatgcagcacgatgtctgagtttatcaatgaagtaaagatgctgtcttagtttgctaaggctgccataacaaaattccacagtctgagtgacttaaatgatagacatttattttctcacagttctgaaaaactggaactgttttagagttagaagtccaaaatccaggtgctgggagggtgggtttcctctgaggcctctgtccttgcagatggccaccttcttgcctctttgtcctcacatagtcatctctttgtggctcagcccctattgtctcttcctcttcttataagaacaccaatcatactgaattagggccccgctttaacagcctcattttaatttaatcaccccttcaaagacctaatctccaaatatgtatatattcatggtgtacaacatgatgttttgatatatgcataccttattgaatggctaaatcaggctaacatatgcattacctcacatattgatcaatttttttatagagaacacttacaatccactctttcagcaactttcaagtgtatataatatatttcttttcttgttattgaaacagggccttgctctgttggccaggctggagtacagtagcgtgatcatggctcattgtagcctctacctcctgggctcaggtgatcctcccacctcagcctcccaagtagcagggaccacagctgcatgtcaccaagcccagctaatttttgtttttgtttttttttaggggttgggtctcgccatgttgcccaggctagtctcaaactcctggactcaaacaatctccccatctcagcctcccaaagtgctgggattaccggcgtgagccaccatgcctagccataatatattaactatagtcaccatgatttacaatagttctcttgaacttatccctcttatttaactaaatttttctgtcttttgatcaacatctctccagtccttttacccccaccctccccagcctctggtatccactattttactgtctgttgctatgaattcaacatttttagattcctcatataagtgagatcatgtattatttgtctttctgtgcctggcataatgtcctccaggttcacccatattgtcacaaatgacaggatttcctcaatttttgaagctgaatagtattccattgtgtgtgtatgtgtatatatatatatacacacagtgaaagactgtgtatatatataccacattttctttatctattcatttgttgatggacacttaggttgattccatatcttggctattgtgaacagtgctgcagtgaaacatgaggatgcagatatctctttgacatcttgacttcagtttctttagatatgttagatacagtgagttctagatttcttttcaaagaatcagtatgtcagtatgttcagttctttgtcctccattttaaagtttaacttccttgtagtttcagtaaacaactttttccatcagttttaatcggtagttcacatttgttcccctggtcacctgctctgtcctgactcatccctatcacctgctttgacccgagtcacccctggtcacctgctctgacctaagtcacctttagttacctgttcctaaccatccttcccacaaactactcaccccaccactctggctcatacctgtactctctttaaaatagccagtcggaattagcttagactgtgtggtccaaccctagccaataggtgaacaacacagcagtaggagctacctgcgtcaggaataagaaccccttccctcccttgtccaggtgtgctctcaccattactccgtttgcaagtcgcacccttctatagaagtaaaaattgccttgctgagaaaattaaatttatgtttgagtgctatttctttgcggcaccgaaaatttgtttctaacagatatatacccagtactgggattgctggttcatatgataattgtatttttaattttttgaagaacttctatactgttttccataatggctgtactaatttacattcccaccaacctgtgccagggttcactgtctccacatctctgccaacacttgatatcttttgtcttttttttgagacagagtcttgctctgtttccccaggctggagtacaatggcgagatcatggctcgtttccccaggctggagtacaatggcgaggtcatggctcactgcaacctcaacctccagatgctcccacttcagcctctcaagtagctgggaccacagatatgtgccgccatacctgactaattttttcttttgtgtttttggtaatagccattctaacacgtatgaggtattatctcattgtggttttaattttcatatccgcgatgattagtgatgttcaacatttttttttttgagacagattcttactctgtcgccaggctggtgtgcagtggcgtgatctcagcttactgtaacctctgcctcccagttttaagcttcccaagtagctgagactacaggcacgcactagcacacccagctaatttttgtatttttagtagagacagggtttcaccatgttggccaggatggtcttgatctcttgaccttgtgatccacccacctcagcctcccaaagtgctgagattacattttttatatactggttggccatttgtatgtcttcttttgataaatgtctattcaggttctttgcctttttttttttaattttatttttattttaaaaatagacatgggggccgggcacagtggatgatgcctgtaatcccagcaccttgggaggtccaggtgggcggatcacctgagggcaggagtttgagactagcctagccaacatgatgaaacctcatctctactgaaaatacaaaaattagccaggtgtggtggcaaatgcctgtagtcccagctactcgggaggctgaggcaggagaatcacttgaacccaggaggcagaggctgcagtgagccaagatcgcgccactacattccagcctgagtgacagagcgagactctatctcaaaaaaaaaaaaatagacatggggtctcaccttgttgcccaggctgaatacaaactctgggctcaataggctcaagtggttctcccatctcaacctctggagtagctggaactataggtatgcacaccacacccagccaacctttgcctattttaaaatcaggctatttttttcattctattgagttgtttgagtttcttgtgtattttagatattaacctcttatcaagatgtaatattctcccattctgtaggttttctcttcactctggtgatcctttgctgtacagctttttagtttgatgtaattccatgtatccatttttgcttttgttgcctgtgctttcacattcatattcaaaaaatcgttgcccagaacagtgtcatggagctttttccctatgttttctgctagtggttttacagttccaggtgttatgtttaagtctttaatccagtttgagttgatttttgtatatggtgtgagatgaaagtctgatttcattgttctgcatgtagacatgcagttttcctagcaccatttattgaagagactgatctttcctcattttgtgctgttggcatctttgttgaaaatcaactataaatgtatggatttatttctgagctctctattctgtaccagtggtctatgtttttaagccagtaccatgctgttttgattactatagctttgaagtcaattttgaaataagatggtgtgatgccaccagctttgttcttttggcttaacattgctttggctatttgggagtttttgtgattccatacgaattttaggattgctttttctatttctgtgaaaaaatgtcattgatattttgatagcagttgcattttagatcacttgggggtatgggcattttattaatattcttccaatctatgaacatgagccatctttttatttatttatgttgtcttcggtttttttcatcaatgtcttatagttttctgtgtacagatcttttacctccttggttaaattcatccctacattgttgttgttgttagtttttttctttttcttgcattcgtctttaactttacattcaaatccagtatctagtcaaaagacaacactcactatgcaataatatacctcaaaaaacatttctagggcacctagtgcctgccaggcgttattctaggtgatgggaatatagagatgaaggaaatgacatctctgtcaccctcttcagctgacagtttgggatgatagatgtatgagcaactaacagcatgagataggtgatggtaagctgtagaaatgggaaggaatttaaactgggactttaatgatgggtaggacttacccaggttggcaggcagaattggtatcccaggcaaagggaccagtgtgaagaagtacagaaaggtgaagaggagaagacatgattgttattttggagacacatcccatatagtgtgaaaaggtcaaagggattaaaagtaatgaggttggacaaatcagcagtggaggctacttgaactccctctgtgctctcacacacctttgtgcatgaattcttttcccaattttatcttccctcaaaaaccaccttctctttcaaaatacactttgattattgttacttatgcctgggtcttattacccaagatggtaaattccttaaggtcaaggatggtgtctttaatcatttataattcccaaaaaatacacagaagaatgctttgcataagtactttgcccatttgaataggataagttgtgaactacctcatgatttaacttccctctcaccaccgtcatgctcgtttggaggcccaggaacacacagatcaggtgacaatgcattcagctgcaggggtaatcattcacattcacacgcatgggactatgctaggcaatatcaaacagcactggcctaagaacttggcttttcaacatccatacctttgactacaaatcagtagagtttatgttatcattaaaagattcaacttttggctggacgccgtggcttatgcctgtaatcctggcactttgggaggctgtggcgggcggaccacctgaggtcagcagtttgagaccagcttggccaacatggtgaagccccatctctactaaaaaaaaaaaatatataaaaatcagccaggcatggtggcacgcacctgtaatcccagctacctgggaggctgaggcaggagaatcgctggaacccaggaggcggagattgcagtgagccaagatcttgccactgtactccagcctgggtgacagagtgagactccatctcagaaaaaaaaaaaaaaaaagagttcaactttcttctacaattatgcctttgtgctgctaggtatgtgataacagaacatttatgaattgaataatcattttgtgcatgtggtgaagcctgccacatgtaatccagaaatcattcaaagccaatcacatacacatgtgagatggcaatggtgattctgcttttcagccggtgacatacatactaagctttttgtagcattaattttatgcttaaagatacatcatttcataaaacatgtattggtgtttatacaacaaccctaaatacatgtattaattttatagattcatgacattcgtcattttctgggcaatacctttatattttttggggtaatttcaactcagattttcatctttgcccattcattatccagccttctagttggatgtgactgctgtttgagcaccttctatgttaggtcatccttataaaagacgatgagatgcttactctgatctagaggaggccacagtttagaaggagacagacatgtaaaagatggagtgccttcagcataaatcaaggcacagaagtcaggatggtggggggagaaggctggcatgtggaaggaagttaaggaaggttcctagagatgactttttttttctttctttctttctttttttgagacagtgtcttgctctgttgcccaggccgaagtgcagtgacatgatctcagctcactttaatctccacctcctgggttcaagtgattctcttgcctcagcctcccaagtagctggggctacaggcgtgcaccaccacacctggctaatttttgtattttcagtagagatgggcttttaccatgttggccaggctcgtcttgaactcctggcctcaagtgatctgcccgccttggcctcctaaagtgctgggattacaggcgtgagccaccatgcccggccccttgagatgacatttaaatttaagctgggtttgaaagagaaataatttgtcagatggaaggaggaaaagagtgttttataggaagggaaagcaggtacaaaggcatgaaagtgagaaactgagtagtttgaggaactgtaaatgattccattattttggagcatcaaatgaaatgagatacaagcagagaggaggttgtttccttgataaggagctgggactttgttctctgaacctgtgttcctcaaagtgtggtccataaaccacatgcacgagaatgccttgaggtgcctggtataatttaaaatctctgaattccaaactgctcttacagaattagaatctcttgagatggaccaaggatctgcattctgcaagctccagtgctacttatgcacactaaggtttggaaaccatagttattatacaggtggtgagaaggctttgaatggtgtaatgtagtgtagtgacttactaagatatttactttccagagaacctggaggcattataggagatctattggaaatgtttcccaagggagcagggagatgattaagaagcttttgcagtagtccacatgagctattataagggccaggatttagagtgatgtgatggagtagacagaaaacagcatgtttataaaatgttttggaaggagagagagaaatttggtgaacaatttaaactcccagctgttagacttgagtgctgtagggaagtgatgcagtagagtagatagttaaggctgtgaactctgaagctagactgccccaacactgctacttttctatctgtgcaatttttggtaagttgcttagcctctcagtgcctcggtttcctttataaagttacaaagtttcctttgttttgagaattaaattaattaacaccaaaaaaagcttggaacaatgcctggaattaaatagtgtccagtacattttagagaggcaaagtaggtagtactagttagcatattcacagttgtagtctagaactaatagttaacataaatagaaatatggtagataaagagcttgtctcggtcccttttctgttgctataacagaatacctgagactgggtaatttataaaggaaataattgtatttggctcatggttctggaggctgtgaagtccagaggcatggtggcagcttctggctagggcttctgtactgcatcataatatggtggaaaagctgaaggataagtgagcaaatgcaaaagagaccacaagaacaagctcagctcccttttaaaacaactcattcttgtgagaactcacccctccaaaatggtattgatctattcatgagggctctgccctcacaacacaataaccccttaaaagcctcacctctcaacactaccactttgggaattaaggttctaataacagtaactttctggggggacccattcaaactatagcagagatcaaaagtttaattgctcatgcctgtgggagcactttgggaggctgaggtgggcagatcacgaggtcaggagtttgagaccagcctgaccaacatggtgaaaccccgtctctactaaaaacacaaaaattagctgggcatggtgacgggtgcctgtaatcccagctactcagaaggctggagaatcgctcgaacccgggaggtagaggttgcattgagccaagatcatgccattgcattccagcctggatgacagagcaagactccatctcaaaaaaaaaaaaaaaagtttaattgctcagtttgaatcccagcctgctattattagccatatgacttaggggaaattatttaacctctctgtgccttagtttctttatctgtaaaatgggaatgatattaatgtataccacatatggtgaggattaaaataatgcatgtaaaggcttacaacagtgcaggcacatggtaaggactcaataaatattgactgctattgtcattatcattattaaccaagaaaaggaagccaagatgaagagcagatatgtgtcagttttgatcttccaggttgaagtgtatagtaggcagtttgcagtataggtttggagctcagcaaagaagtcagggctagagacatcaatttggaagcaaaaagtatagagaagttactttaaatcatgagcttcagtgaaatgtcaaagataggcgttgtagttcaagaaggaatagatggggaatggaagcaggagaaacgaacaggcattctctgagccaggcaagaattgctacttacaattcttagtagatataatatactttccattcccaataaccctacagcatcatatttgttatgctggagccaggccatactggcttattcagtgacttcatattggtagcttgcaattggcctggatgaaagcatttacactgcagaaatgggaaatgctacatatcagagctcccctggcctcccaggctcccagtccttgccctgccaagagccatattactagggcaacatataattatccttactgttgaagaaatggaagcttagagaagtgaagcccctgccttttaaattgcacaatgattcctcttcattgaaaatgccctttaactatttggttttccaaagttgatatatttgatgcttctaatacttgaaaacttaagtgtatgcccactgtgagtgagttattacattactctaatattgtattagaaaacaatcctgaatgagtttagagaaatagcttagagcatctgttgatgatgatttaaaacacagggattatatttccttgactgttaaagagtttgctgactagaaaccatgagctggttttattagctattatactaaaaagagtcattgaacaaagggtaagtcagatgatgtgggagggaatgaaagaattacaggtgaatagtctcaaattatttaattcattatacaccataccttaatgagtagatgaaaagttgaatgaaacactcattttactctagaacagtgtaatttaaaatggatgtgtaaaatcgcttagcatgaattcagagactttacaggaaaaaaatatatatttttttacttgtttctaaagtacaaattcagtttattaatccgtttatgacacagtacacaggaggcaaagtgtttcacatcatagacttcacttccaattccttggaatgttcatttctttggcttacaggagagactagacaggaaagccaggcaatgcttaggcaactaaaatgaggttgggggcaatgctaacgtcatcctcacaggaacagccacagggactgctagtcacaagcgggttttctagacctgttagctggaagcatggggagcaccatttctggacgctcgtgctgtgtcggacttcagccatctccaccacacaggtacagcacccttagtgtcttgctggatgtaatagtacagggacttgctatactttctcttgaattcagacctaattttcaacatgtccacttcattgtgggagaccatgattctgatcaggaccttatcttgagtccccatgcccattatggagtcgtacagccggtcagcgaaatacaggggcttgttctgaatacactggaccaggttcaggaaagaattttccaggtctcctttaacctctttcttgatgctctccaacatgtcataaggactgtagctcttgtacctatcaaatactttctggaagtgggacatgctccgctcggtcatgacgctgatccacttgggaacttcagttcctttcctcttcaccccagcgtcatagagatcccgggcatcttggtcaatcagttcataatcaatgacagagccatcctctgctcttctaccctttgccagggcaaccatcagcttgcagaagtcaccagatgtgtccgaaataatgtccttctccagatcagtcttgtacatttccttgtagactctgttaatttcctgcagctcttggttggttcttgagcagatgatctcaatgagggagtccttgttggttcccagccccttcatggaagattttagctcagaagcatcatactgagcaggtgtctttaataggcccaaagccactatctaggtggccagataaggctgacttaagtgctgatacaagttcctttttggtccttctctggtaggtgaaggcaatatcctgtctctgtgcattgctgtggttagtcaaaatgttgacagtggtgatctcatccacacctttggtcttgatggccatttcaatgttcaaagcatcctgctcagcatcaaatttggtgtaggctttgactgacccaaatgcacttgggagtgtagagtgttcaccctccaagctgagcttgcacaggatttcatgaacagcagatattttgaaggaagctgggctgggcaccaagacctgagagcgtccccagatgctgagctgaaaatatattattttatgcccctctcccctgccccacctctgcaaactaccacctttcctccctaaaatatatgaggagggaggtcgtgctaagttggcatcttaggtcattataggaccttcaccccatccttgagaatctcatccttgggaactcttcttgcatttcaagtggaaaaagatgcaactaatattgactaagtgctaggcactatgctgtgttatagggtgcaatggtgtacaggacagatgttgctcctgccctcaagcaacttacagtgtagtgaaggatacagacagttaaataaagtatcatgtgttaaaggatggggttttctaaaggattttaaagagaaaacatgattcatgtgagcccaaaatgtaattatcttcaccaccaaaacccagaagaagccatgtgtgtattggggaaaaaagtgttatgtaaaggatcaggagaaccaggttttattcttccccctgtctctgatgatctcggtaatgtgtctagcttcaactttctcatctataaaatggggatgataatgtttgtcctgctatctcatgggatggtatgtgagaaaatgtacatgaaagtgctataaatataattgaacattttgttttccagtgatacaatgggggttgtaatttactcactcattaataacttattcatgcactttttcatccagcaaacatttgttaagcacctacttgattgaagatcctgtgttagatcttacacttggctcagtttcatcttgttgcatgattccattcaaaacatctagatttatttagcattaacttcttttttttttttttttttgagatggagtcttgcaggctgaagtacagtggcatgatctcagcccactgcaaccactgcctcctgggttcaaacaattctcctgcctcggcctcctgagtagctgggattacaggcatgcgccaccatgctcagctaattttttgtatttttagtagtagggatggggtttcattatgttggccaggctggtcttaaattcctgacctcaagtgatccacccaccttggcctcccaaagtgctgggattacaggtgtaagccattgtgcccggccagcattaatttcatattaagttggagtgggtggtgagaggaaatctgcatttattgatcccctatttcagtctaagggttcaccttatgtaatcttcctggaggggtaggtggaagtgaccaggaagaatatgggtgagaagctgttgaattaaaaattcattttgtgcttcataggctagacttgcatctggaaaaacaaaatgatttaattatggaattatagaataattgttaaattgattataattactttaaaaattcttgttattcattctactagctaatatgtaaccatcaaatgaaatcttttacattaaagtagatagaaaaatattttataagtattatatgtgttttgtgttatttatatttgttatgaaagaactagtttttattatatatttagaatactttagagagagagaagagactttctacaaatgaaacagaatttactgaaaagcttgaagagtaaggcatgatcccaaattatttctaacttctggaattgccttaagacactttacaaacacttgaacattgcagcataatgacaatctactgtagtgctgcatcaccatcaagatatttctagtttaactgttggtgaaaatagttggcatcaattgtcttcccaagtatatgctagtggtgtccttttaatcttcaggagtaacacactgattctgctgtgctttcaggtagagtttaaaaaataataataatcaataatctccaatacgacaaaagaggaccgtaagaatcaggagatgttaccaggaatcccaaccagccattcagaaaccaagccatagagcttaaagaaaagattttttaaaaacaaatattgcaaaataaaaatggtagtgcctgtttcgtttagcttctttcaaaaatatataagcaatgttagacaaacagacattcctctgaccttgtgatttaatttacatgtgggcaacagacttgagctctccttaaattcaaaccaagaataagagctgggccaacacattgcccttgagttcagcagaggtcatggaacctctttccagcagtgtggtcttttgcaacacagtccattgctcttgtgacctagtattagcaggtatggaacatctcacattcatgtcaagctaagcatagagtcttccttctccttgctctgaatggtctattactatggaatccaactaaatatcttcccaagttttaaaattataccccaaaatacaactattgcccatttctactcacactgaaaaaacgtgtgcttatttctgtaaagaacaaaaagtgttagtactttttcctcatattttccctcctccaacatcatgtccatattttcaaaaggaaaacagactctttttgactaagacacctccttgactagtactaaagcactattttctctgtttttttttcttttccttttataagctgctactgtctgcatggtcttctgaatagaataggcatcattctagcaggatagacaaaaggctagaggaaggagagcagcaggcagtttttgtccctacctggaccacaaagacagtaaatcagtgttcatctattctgttcaggtgctttttagccccttctctcctgtttttcagtatttctttcccttccttgtatgccctctaagcctgggtgcactttcaattttatataagcaagaatctagaatagcctgggttttatatagtcacttctttggtttatggtccagcctcagttaattggtcttcatttcctcatcttgtttaattccatgcttgtgtttatcaatttttttttttttttgtagagatgggttcttactgtgttgcccaggctgtctcgaactcttggcctcaagcaatcctcctgcctcagcctcccaaagtgctgtgattacaggcacgagctatgatgcctggcctataaaatgtttttgataaatgaagtttttattcttttatttatttatttatttatttatttattattattatactttaagttttagggtacatgtgcacaatgtgcatgttagttacatatgtatacatgtgcatgctggtgcgctgcacccactaactcgtcatctagcattaggtatatctcccaatgctatccctaccccctccccccaccccacaacagtccccagagtgtgatgttccccttcctgtgtccatgtgttctcattgttcaattcccacctgtgagtgagaatatgtggtgtttggttttttgttcttgcgatagtttactgagaatgatgatttccaattttatccatgtccctacaaaggacatgaactcatcattttttatggctgcatagtattccatggtgtatatgtgccacattttcttaatccagtctatcattgttggacatttgggttggttccaattctttgctattgtgaataatgccgcaacaaacaaccccatcaaaaagtgggcgaaggacatgaacagacacttctcaaaagaagacatttatgcagccaaaaaacacatgaaaaaatgctcaccatcactggccatcagagaaatgcaaatcaaaaccacaatgagataccatctcacaccagttagaatggcgatcattaaaaagtcaggaaacaacaggtgctggagaggatgtggagaaataggaatacttttacactgttggtgggactgtaaactagttcaacccttgtggaagtcagtgtggtgattcctcagggatctagaactagaaataccattcgacccagccatcccattactgggtatatatccaaaggactataaatcgtgctgctataaagacacatgcacacgtatgtttattgcggcactattcacaacagcaaagtttttattcttaagagaccctggcttgtccataccacctttgaaaaattatttctaagctgagcattttagaattgtttctgtttctagcccatctgttttgctgtacctgttacctagctattattcagacatgggggaaagaccaaaaataatatttgttttaaaacaaatataaaataaaaatggcagtgcccgtttcatctagattctttcagaaatatataagcaacgttagacaaacagatgttcctccaaccttgtgatttaacttacatgtgggaaacagactcaagctctccttaacttcaaaccatgttggcacatatcccccttcgagggccaaccactcctttcctgctccccactaccagaaacaactcgccatttcacgagtgttcactgcttccatattcatgcatattatggggattctatgtgggtcgtgtattgaagatcctttcttctgatacatttgaattaaaatatgacagtatctggatctcaaatttttctttcacgctagtgcgagtagatgagatgcagagttagtgagtaaacttgatagggtccatgattcaatgaactgaccaccacctgggtctggtgagaaccagctcatctatgatgattctgcccagcaattttgttgttgattttattctaagtttaatccatcaccaatttcaattcctaaacccaaaaatctgtttcagacaagtctattcccaaacagtgcttaagcaggtgttttacattagccaccaccagtgcatccttgtctaccctttcctaaggcactgcattgatgtcgaaaaacaaaatagcaatggctctttttttttttttttttttttttgagacagagtcttgctctgtcatctaggctagagtgcagtggtgtgatctcagttcactgcaacctccacctcccatgtttgtttaagcgattctcctgcctcagcctaccgagtagctgggattacaggcacacactgccatgcccagttagtttttgtatttttagtagagatggggtttcaccatgttggccaggctggtctcgaactcctgacctcaggtaattcgtccatctcggcctcacaaagtgctgggattacaggcatgagccactgttcccggcccaaattgctcttttgaatataaatgaaattataaacctgaagaatggttctctctctctatgaaaaatttatcttccttcctggtcatttttgagcaaaattcattgtttccattcattaatatttacatcatcctattgaaataaatcataaaaacttcttttaaaacaaaaccagatgtccgttaacctgtagatgatttgctgtttttctctctgcctcatctattcttttaaaagagagtctagccgaggcgggcggatcacgaggtcaggagatcgagaccatcccggctaaaacggtgaaaccctgtctctactaaaaatacaaaaaattagccgggcgtagtggcgggcgcctgtagtcccagctacttgggaggctgaggcaggagaatggcgtgaacccgggaggtggagcttgcagtgagccgagatcccgccactgcactccagcctgggcgacagagcgagactccgtctcaaaaaaaaaaaaaaaaaaaaaaaagagagtctagtatggccaggtgtggtggttattgtggtatgtacctatagttccaactagttgagaggctgacacaggagcatcgcttaggcccaggagtttgagaccagcctgggcaatatcgcaagaccctgtctcaaacaaacaaaacaaatcaaaaaaagaatctagtatgggtggaaatattttcttggattaatgaatttccttttgcctttcttatctaatctacaaagcaccctgcgagaatatctttttataatttcaggaagaatatccagcctctgagatattgaatctttgaaaataatctataagtaaatccataatatgaaaatcgcctactatttttataactatctgtggccttcggtttgtcaaatgtactgaaagccaagcgtccacatttcttccaagagctgctgagtgagagggtagaattttggcaaaactgtaaaataaggccctttcctgttgcatatccttagggcaaggcccctttgccaggtttccctctcccactaaaaccaagaatggcaggacccaaactgagtctgaaccatcccaaatgccccacacaccccaaatgcaaaccaggtccacaaagatagaagacagaggcagagtgaccagggctgagaatgtttattgccatgcccaaggcagcacagacctgacagatagcagtgccatagggtaaagtgggaaagccatgtcagataaaggcaggccgtattagtttttattatgatgtctttgtgggatctaagaatattttaaacatgttaatatgcagctacaaattaataagagaagattgacatttacttaaaaaagtgattttgcagagactgttgtcaggaagagaggtttaatagcatatggattaggttattggggagggagggtgccctttttttaaagtatatttaaaaacaatgcattctcaggtacctgtggaaatctgaattattctcttgctgaaacagagaaatctaaccctttagtgcttaatttttatgattttatcatttattttaggtaccaaaggaagaaataaaggagagtttacaaatcttcagggggtagctgcatctacaaatggaaagatattaattgcagacagtaacaaccaatgtgtgcaggtatagcccctaattatatacctttaactacttatattgataaaaatatatatagttacatatattcctactttagacttcagatacatggtgtaaggaaaaaagcttatgtttatgtagacttttcttcaaatagagtttgcgtgttctgatctctgtatgtatggcagatgtttctgcctatgccttcctcagcaatgcctgtactagttcacattccaatgaatgtaatttatcttacagatattttccaatgatggccagttcaaaagtcgttttggcatacggggacgctctccggggcagctgcagcggcccacaggagtggctgtacatcccagtggggacataatcattgccgattatgataataaatgggtcagcattttctcctccgatgggaaatttaaggtaagattaactactaattgttcactaaacaatggagagaaggaacaggaaatacaaaatgaaattgcatatttcttttttgagatgcagtgcaacattcaacaattcttcatacacaaagatatctgacatctaagtttgtgaagtgagagtaacagtgataatttcataaatctattcatatatatcctaaatgtggctttgttttttaaagcaattaggttgctcagtcactttttttctttaaaaccatagatttacagggaaactggtcctgttacctcaattcaatgaaaaacaacaaggttttcaaaagagttattaagaggcagtttatatttctcaaattagtctacatgttgtcacttaggaagtactttttactttctcaggcctgtgacagatgatatgggagaaacagaattgtaaaaaatagtttccaccttttaaaaatgtacaggcccattttggaaaaaagactcaaacacaagaaatgacagaaaacaatttatgtcagtctctaatgagtcgtacattgatacaatctgaaaacatacgtacataatatgggacttggaaaaaaaaagaaaaggctgaatttccagagaaaatggaagtggagctacactttgagggatcccattgtttgatatatttgctatcattcccagcgtcagctttttgcaaataaaaatttaactcaatgtcttcacctaattgccaaagagtagagagccctctggtgataacagaaatctctcttatgaagtgtcatcaaagaattgtatcagcccgcccattttctacatttgctcataaaaaaattgtgagacacgtcgtcaaagatctttgtaagggccatttgcattatgcctttttttttttttttttttttttttgagacggagtcttgctctgtcacccagtctggagtgcagtggcgcgatctcagctcactgcaagctctgcctcccaggttcacgccattctcctgcctcagcctcctgagtagctgggactacaggtgcccgccaccacgcccggctaactttttgcatttttagtagagacggggtttcaccgtgttagctaggatggtctggatctcctgacctcatgatccgcccgcctcggcctcccaaagtgctgggattacaggcgtgagccaccacgcctggccgcattatgccttatatatttccctgtccagcctactagaggcttctatttctgttgataacatgagttttaactcagatcaacacattgccatcccagcttattactgtttggccatctgcaaatcgtaacttccttgagcttcaatagccttgtttttaaaattttgatttaaaaaagatctatcttggccaggcgcagtggctcagcctgtaatcccagcactttgggaggccgaggcgggcggatcacaaggtcaggagatcgagaccatcctggctaacacggtgaaaccccgtctctactaaaaatacaaaaaaattagccggccgtggtggcgtgcacctgtagtcccagctgctggggaggctgagacagcagaatggtgtgaaccccgggaggcggagcttgcagtgagccaagatcgtgccactgcactccagcctgggcgacaaagcaagactctgtctcaaaaagaaaaaaaaaaaaaaagatctatcttgcctgggcatggtggctcatgcctgcaatcccagcactttgggaagctgaagcaggaggattgcttgagcccaggagttcaagaccagcctgggaaacatggcaagaccctgcctctacaaaaaataaaattagccaggtgtggttgcacaggcctgtagtcccagccacttgggaggctgaggtgggaggattgcttgagcccagaagttagaggctgcagtcacccgtgactacacctgtgcactgcagcctaggtgacagagtaagaccctgtctcaaaagaaaaaaaagacctatctcataggatttaagcaaagactaaatgagattttatgtgccacatacaaaataaggatctaagaaatgaatgttcttttccatgccgctagtaaccctgtccaaaaaatgaagtcttgtttggtcagctgtgatctgggcttcatgtcctcatgcaggcacctggtggtcatcactttgtctaggagtttggagatgctgcttttcataatccaatctggaattctaaagattactcaaagtgtacttattggtttctttctggaagaatttctgttttcctttttaaagtcttcagactgctgtagtcccctcattgttttaatgaaatgagttacgtaattgtgaaactctcagatttgagcctctgttttgtgtgaggcagcatcttgtcaattttggagactgaaaaactgtcattttttattccataatattgcatgcaattcttcaatcacccttgaatttttggtttcactagaaatttaatggctctgtatgatgaccacatatatataaaaatctcctgcctttctgtagctctaacttcttcccccttttttgcattttaataattgtatatgtggtaagacatacccaaatatgacaagtttaatgtgaatatttatatcttgaatatcttgaaaatgtttatatagtttggaggcaacccatttgtttatgttttatactctagcaaaaccgtgatctgtctttgtaaattcagaagctaatactaaaataggttcacttacggagacaggagttttatgtctaaggaagaagggctctctaagcattttttgttcagtggttcaatagtctatctgtaatagacactcttagaagaactgggttcttagagttggaatattaaaggtaataatgagaataaactctaaagaacactcatgccccctagaggattgggggagtggaggtggtgtagtttcagcaataccctcttctatgataggtgttgatcaaaacccaaagggtaaaaggatagcatgtaaaaacactttaggaccctcacaggagttcatccaagtggaatatccacaggtatagacagagatacttattttcttctttttcttctttggtgggactcagtaaaattaaacaagtgctgagaaagacacacgtttaacaccagtgtagactctttgtatttattcctagtagttccagagatgtaacatcttatctccttttcttttattcaccaatttattagccctaatttttatttctctctgcctcctctgaatttattctatcttccccactgcctcctatcttccagcccatctagaaaccttttctatccaaacaaatggaaacacctctggccaccttactctaaaatatctcatctctttcctgttcaatttaaggaactatttgttgagttaaataccctgattaaaccattccaaaggcagggttaaaatatttttgctgggccgggcacagtggctcacatctgtaatcccagcaccttgggaggccgcagcgggcaaatcacctgaggtcaggagttcaagaccagcctggccaacatggtgaaatcccatctctactaaaaacacaaaaaattatctgggcatggtgatgggcgcctgtaatcccagctactcgggaggctgaggcaggaggatcacttgaacccgggaggcagaggttgcaatgagctgagattgcgccattgcactccagcctgggcaacaagagcaaaactctgtctcaaaaaaaaaatatatatatatattttttgttgtttactattctgtttaagatggggttgacacaatcagggaaatgcagggattcttacctttcacttggttgaatccagtgcagctaaactaggagtgatgaagggaagtgtaaagaaattttggttcaatgtttaagttattctttcagatctgccctagttgtcactacatgatagaatggaagtaaccctttattttctctttttattctagataattatccatttgatattatttggttgagtcatctaagcaactacaagtgttcataatgttaggtagtaatgacattcttgttttaatcatcgaagtgccttctctcccttttgatctctgctgacttaccctccatttagacatgaaacaacaaatgccatttctttacccaccattgtgttatagcctctttgatctttgggctagattggagaatcagaatcaaatttacacagcagttcctcttgccaagaaaaccactgtttctttcctaagtaattgtgttcctttgctctaaagagatgaaatctgaatcttcatcatttataaacttagaagaataaaaggagcatataaagtctaaagtccccatcatgcaaagtcccatcctgctactagaaaatttaaaaatacatatgtggttcacattatatttctatcagacagcactaatatagagagataaaataagaaggctaaagcataacctatgagaatataactttttgggttttctaagatatagacgctgatttctcacttttccttccagaagtctatgtacatacatgcacacatataacacatgtggactcagactacactcattgttccttaccttaatttgtttaatagcatgtctgagagtttttgttgttgttgttgttttcgagacagagtctcgctctgtcacccaggctggagtgaggtggcgcgaccttggctaactgcaaccttcatctcccaggttcaagtgattctcctgcctcagcctcctgagtagctggaattataggcacccaccaccacacccagctaatttttgtatttttagtagagatggggtttcaccaccttggccaactggtctcgaactcctgacctcaagttatccacccacctcggcctcccaaagtgctgggattacaggtgtgagccaccgcgcccggcgaagagttctttcataaaaacacatagatctgcttccctccaacacgtcaagcctgggtgccagggagaactgtggttcttatagtttccctgacttaacatacattccttcctgctgtttcctcacctggggtggtccttcgccttccttgtctgctgtggcgtcatcaagttttcacttcacatgcattctgagatggcctaattgaattctcccaagtatattaaaatgaagactcaataccacactctttaaagagatacagtagacatgtttgtccctgcaatgtgactgagacatacttgagggcaagagctacgtcttatttgtgtttgtttgccatgtgcctagaataccgtcaggcacatagtgggtgcttgggcagtgtttgtagaattaggaaataaataagtgaatgagtgaagcacttctttatacgtagtctagaaaattaagctatagaaagaaaagtaaaggtacaagacctgtatctcatggcaaatagacatttaaatacacaccacagtctactcaagaacaggaataaaatttaaaatacggtatatgattgatagaaatcaaatgcttttcccctattttaaaatatgataaaaagtggagccatttaatcattatgattgccctataataatgctagacttttaaaattaatgtatccaatagatattcattgaatatttattatgcaccaagaagtgtgttgcccctgagtacacaatggtgaataaaacagatgtgactcccgcccaaggagaacttaattctcgtaaagtttaatgctagatgccaggcaattttgatattatgatctataacaatgacagtgatggcttccctacagtgactgcttgctgtgtgctacactctacagtaaaccctttacctaccttattttacttaatacatcttccaaaaatgccattaggagttgtcgagttgtcattttttggacattttttaatgtataaggaatctgaagtttaaggaaatgaaatccatctgtgctattccaggtgtgtttaaagcaagcaatggaagtaggtcattcttctgagtcataatccagtgatctttcaccagatcacaccgcctcttcagcagggaactgtgaccccagtttaggggatcctagactatttttggtggtgatctcttttaagaataaggattttaagggctgggcacgagggctcatgcctgtaatcccagcactttgggaggtcgaggtgggtggatcacaaggtcaggagttcaagacgagcctggccaacaaagtgaaaccctgtctctactaaaaatacaaaaaaaattagccaggcatggtggtgcacgcctgtagtcccagctattcaggaggctgaggcaggagaattgcatgaacccaggaggtggaggttgcagtgagccgagattgcaccactgcactccagctgggacaacagaatgagacttcgtctcaaaaataaataaataaataaataaaagaataaggatttatatagatatcagcagcagataatggatgtgacaaagccagttttccaagacagaagttcattgtgatatatgagtagctgtgtacccgtttgaaccttcaggtaaatgttgaccaaaacagtgtttatcttcatgttctgtagtggtttaaactttgactctatactgtacttctatttctgtacttgtttcaaacagacaaaaattggatcaggaaagctgatgggacccaaaggagtttctgtggaccgcaatgggcacattattgttgtggacaacaaggcgtgctgcgtgtttatcttccagccaaacgggaaaatagtcaccaggtttggtagccgaggaaatggggacaggcagtttgcaggtacactcgatggtaatatgtaaacccccttttttatgcttcttctgctcacatttgcatgatgttggagcatgttgaagacaccgcatccctagtgtgtttgctggctttgggaaagatgctggggataaaatctaagcaaaagcatgtttcgttgcttgagccttagtcaccgccacccacccggcagtaagttgagctgcagtccttgtgtggtttttatcggtggcagttcacaactcagaagtctagctttgaaatattcatattaaataaggtataaattttaaaataaaaatatttgaaaaacaaggaataactactgtttcagcctagctgtaactttgcttaaaaagccactgaatgagaattttttttcacctttctaggttattgtaagagaacaggagtctagaatatttgctaggtttaaggagggcagtctgttttacgtctctttggtgtagcactttgcaatcacaagcttatttaggtttttgcatttgcaagaagaggctgaaaatagcttattaattttctttttgaaaggatgcttttggcacttagtattaatttgcataatatttgtttatgctttgtctccagttctgccaagtttctgaatgtcacccagaattatagtgtgggttttctgttgttttgttttgttttgttttgtttttgagacagggtctcgctctgtcacccaggctggagtgcagtggcgtgatctcagctcactgcagcctcgacctcctgggttcaagtgatcctcctgcctcagccctccaagtagctgggactacaggcatgtgccaccatgtccagctaatcaatttttaaaaattacatattggagtctcttttccaatgctgagttgccacgtctttccttggtgggagctgagggctctaaaatgactaacagatactcagggaagctggcagatgtgacttttagatggtggcacggagaatgaattctgatgcttactgctcctcccacttcattagggctgctagaactcccagcctgcttgagaaagagtcagaatagactggcgcaagtagagaataatataggatccatgttatctgcaactggaggtctggctgaatgatctttcaaagactgagtctatgattctttgtactttcttaaataactaagttaatatattaagtttgtttgttacagtaactgctatatgtaatcacttttgttgtagtcatcacatatttttttccatctttattgcaggtccccattttgcagctgtaaatagcaataatgagattattattacagatttccataatcattctgtcaaggtactacaagcacatgagttgttgttaacttttaactgcttttatggagaaattggtctgcgagaaaataatgcaatacttacatatggcaccaaagggagttaaccagcagagtagactttgttctgctcaaagatgccggttttaacttggacttacagaccttggaaagtcaggaaattgaataaaatgtggtggcaataagttgcttaatttgaaactggtgcaaatgaagaggacttgaaaattaaattttaaaaagcaattcgttgaacttagaggcagaactttctgaagcttaatgttttgtggctagtcaataaattaaaatcactttttcaattttccgcatctttttgttaaaaaaaaaattagatgttcgactctgttacaacaacagacagcatggggagggggataatcctagcatacattcatacagtatattttatacttcttagaatgctttcacacatttggtgttctttagaaaacagtgacctatagtatatctttcttactaggtaccaggggagagagaattgaactttattatgagaaaatcaggaaataataaaatggttcaaaacacattactcacttactgaaatgatgaggaaatatttagtaatatcctagatcaggcttctcaaggtgtgatgcatgttccactgaaggtatgatccgtggccataggcagtacactggtggatatttttattttaagttatgcatttattttagggctaccttttgtttacatcaagtgatgctgttttgcacttacagacataataaagtttttcttttaaatacattaatctaaattttaaaaggtgagtcattttaaaggaaaaatgataaggaaacagcagaggatggtatgccagtgagtaaagtttgcacttagaaacaatgactgagcaaccaaaattaataatgacttatcagtgctaatgactgcgatagctagataaggggtaggttttttaacacccaaaggtactctctgtgatgtcctttctgcatcctggagagcctctaacctgagtaaatggagagggcttggatctttttgatgggtgccaagtccctgtgcagacagtagcgcacagtgggctgcggaaatggggtcaggataagggaacagggtgcccaccgttgcttttttctgaaactgctccctgccatattgtctctccagagatgctcacatggtggcataggtcccccctacactcaaatgcagataatctgcattctctgctgaaactactgtccatgggaagtgtcttggtaaaaggaataggatagtggaaaaagttggtagccaaagaaggacggaagtagagagcaaagaggcagcagtaaccgggctggggactgcctccccaagagttataacagtgctggagaatgagcacaactgtcaaaggataacacaggttgttctcatacttcctactctcactcactttgtagaggaatcattcatataactacagggcattcagcaagaaggaaacccatatgagatcctaatagtacaaaggccagcaaatgcttgcataggttctgcccactcccagctgaaagacagtcataattaatcaagtggctcttttctactaagcgcaactgtgatctcagagcctttcctgtccagtgctccaggcaacctctaagaatcaactggcattggtatgtgggacggctcctatttaccagtcctggctgacactgtagaaagaattaaaacatatgtaagtagccaaaatgcaaggcaggtagcactaaatagtttcataaaataggtacatataaagtttcctaactttccaaaagaaaagagaagatttccttaattaagatgatcagaggagacttccaagtggagatggtatttgacatgagcagaattttgaaatcaggaaagggctatcatcaaggtgatttttttaaaaaacttgctttaaatatttattgtaaaaagcaaagctgtaaaaactatttaagctgatacttctgcctcttaatttgttttcatgtgaataatttttaagtaattaaatggcattttagtcgggaaaaatagaaaatatgaaacatttataattcttaatattctgaaaactcttcaagttttcagcatggtagaagtagattattttagctatttatttaaactcaattttcttcttgttttaaaaaaccatagcctttcgttgttgtttctcttctttttgacaactattgccaaataagttttatggaatacttgggtttttcttccccatgtaatgctgggcagttagcaatagttctgaattcaggtcacttctctgttgataagtgtaaaatgcatatctataggtcagtgctaacaaggggtctagttagcttcttagctatctgcagaatatattttcttttcatcacaaaacaagtaagactagatttggcatccttcattatcccaaaatgaagcaaaactacttgagtcatttggattatgcccaggaaaacatattgactcagaaagataaacaaggctgggcgcagtggctcacgcctgtaatcccagcactctgggacgccaaggcggacagctcacctgaggtcaggagttcgagacccgcctagccaacagggcgaaacctcgtctccagtaaaaatacaaaaattagccgggcgtggtggtgggcgcctgtaaccccaggccctcaggaggttgaggcaggagaattgcttgaaccaggaagtggaggttgcggtgagccaagattgtgccactgcattccagcctgggtgacagaataagactccatctcaaaaaaaaaaaaaaaaaaagaaagaaagataaacaaaatgactatttgtagggcttagtaagggaaaaaaatagagaataataaattgtgtccagcataaacatgttcccactggtctttaaaactacaatgtgttatgtaaaaggagacaaaaagagtcagaaaaaaaatttaaatatggcatcttagtaaaagctggttgttcttgccctggtcctttctaaagaaccacaaaggtggcttgctttcttggcaagtacgtaatgaattcaggaagtagccatgactctttcttttttatcgtaatgtgagtttagcctgtagagatggaagtgtcctactttcccaaggtacttacctaaaagtaatggtcattttgatcttctgtaatcagagatgacaacaggtggctctctaaaaggtcttgagatcatccccaaatgaagatctgtactcaaatatagtgagctctttcagttctacatttgaggaaaccttactctcaaagtgccttttacataatactttcagatttgtcaatgaatatttctatgcatctaggcatcatgacaatggaagttaaaaataatgtcctggagacatttcaaaaccattaggtatcatctgaatcatcaagatacaattatgcttactatagtgttatcattaaacattaacatttacttttttcaaaatcagtgatctgtattgatacatatttagtagcactctattaataagaatatgtaattaaccacagcactccactgcttgaccatatcagatgttagagaatttgcttaagagttctgtttagccccctacttctaacagcttcccgtctctctactgagagataaaagagtaatagaaaatagagtaatagaaactacttttatattcatcaaagccttaggatcatataaactctcgaactaaaatatcttctgagggtaaataaaaaagcccttctcttatttctcacctgctgctaccacacatgtgcacacacacatgcaatgaatttctcccattctaagtatggagtccagcctactctttctagttatgttgatgtagtaaaatgataataaattctgagcatctggcataacaaaaaactcctactctctgatccaacttttaatggtcatccatcctgttagaaatataaatataatgcccattcttgaaattagcaatttctttaaaggtgggaagaataatattattgaaaattatagcacttcttactcatacttacttgtacagtattttataacaaaggtatcattcacataaggatttaataaccagatataagccaaaaaaagtgatgatttaacaaatgataaatcagatttatacagtaatttggggaaccacaatgatatgcagtctgtcttgtagatttcattttctttttttagaatgtcttaaatgataagtcttgttataaataacctgctcaaatagatatttttttaatccatcatgttggttcaagtattttgatgtaaaacaaaataatttaaaaatatttcatacaggtgtttaatcaggaaggagaattcatgttgaagtttggctcaaatggagaaggaaatgggcagtttaatgctccaacaggtgtagcagtggattcaaatggaaacatcattgtggccgactggggaaacagcaggatccaggtagatcaatgtgctaatgtatatggttagagtgtttggtatttgttaaaagtgaagaatttgctgtcccccaaactggaatgttttctcttttccattggttaggacatagaaccatagatactctcaccagaaggaccaaactcagcaagatggagtagaaaaaatgttaccagactgaaaccctctaaattggggttttaatatggaccccacagacccccacaaagggtctgaagatagaattcaagggggccattgaataaaaatactacattattatatttatgaacctctggctgaaaattatcatttcccttaatcatgaatataagcaacaatcatagtaattttagtaatgcctatgactttgtcaccaagaaaaatcacagaaattttcatatcatattgttgcaaaaatcttgaattgtcacttattctcatcactacttcaaaattacagtaattattagacccattactatttcttattatttaatgtgctaatttttagaagcacacacatattgctctatcataatttagtaatatttcaatagctatattttaatatggttttttacaatcccatgtgttttgttttatgaattttaaaacactattgtgctaaatgacccttgagtcaaagagggagtctcaaggaaaattgtaaaatatattggactgaatgaaaatgcaaatagaacgtatcaaaatttgtggaatttagcaaaaacaatgctgagagggaaattaatacgctaaatgcttctattagaaaagaggaaacattttaaatcaatggtctaagctgccatctcaagaagctagaaagaaaagagcaaaccccaaacaagcagaaggaagcaaggccgaaattaaaggctgggcgctgtggctcatgcctttaatcccagcactttgggaggccaaggcaggcagatcacttgaggtcaggagttcgagacaagctcggccaacacggtgtaaccccatctctactaaaaatacaaaaaatttgccaggtgtggtggcaggcgcctgcaagcccagctactcaggaggctgaagcaggagaatcgcttgaacccaggaggaagaggcttcagtgagccaagatcacatcattgcactccagcctgggcaacagaaggagactctgtctcaaaaaattaaaaaaaaaaaagaaatgaaattcaaaacagaaaagcaatagggaaaatccatgaaatagcaaactggctctttgaaaagatagtaaaaccaacaaaaccctagcaagactgacaaaggaaataagagaaaagacacaaaatactaatattaatacatgttctgtagacatcaaaaggataataagggaattctgtgaacaactctacatacacaagtttgacaacttagatgaaatagacaactcctcaaaaaataccaactccacaactcccgtatgaaataatttgaatagccctataactattaagaaaatttaattcataattttaaaacaccaaaaagaaatgtctagatggagatgatttcaccatggaattcttccaaatgtttaaagaatttagtaacaattgtatacaatttcttccagaaaatagaagataagagaatacttcccaactcattttccaatcagcttttgaagccctgataccaaaaccaggctaagacagtacaaaaaagaaagctacagaccatattcctcctgtgtgtaaaaattcttaaagatatattaacaaatataattcagcaatatgtaaaaattgctccatgaccaagtggagtttattccaggaatgcaagactggtttagtattagaaaatcagggagtctctgagctactctggcttgggaggctgccctttaaaaaataaaaataaaaataaagaaaatcagtcaatgtaataatccaccatagtaaaattctaaagaagaaaaactatatgatcatatcaattgacactgaaaaatcatttgacaaaatttaatacccattcatgacaaaactctcagaaaactaagactctctcaacttgataaacaacatctatgaaaaccatagctaacaccatacttcatagtaaaagactgaatgcattccctatagagcaaggatgtctgcaaggatgtctcaccattcttgttcaatataatactagaagttctagccagcacaaaaggtagaaaggaaataaaaagcttacaaattagagtggaagaaattaaccactctccctgtttgcagataacatgatgtttacatagaaaatcccaaagaatctataaaaacagttcctagaataggtgagttcagcaagattgcagaatataagatcaacatacaaaaatcaattatggtcaggcacggtggctcatgcatgtaacgccagcactttaggaggccaaggtgggaagattgcttgaggccaggagtttgagactagcctgggcaacacaggacgacactatctctacaaaagaatacaaagattagccagacatggtggcacatgtctataggctcagccactcaggaggctgaggcatgaggattccttaagtctgggagttggagattgcagtgagctatgattgtgctactgcactccagcctgggtgacagagcaagaccctgtctcttaagaaaaaacaaaaaaaaattatatttttataaactagcaactaacagtgaaaaccaaaattaaaaacacaataccatttagaatcactgaaaaaatatatacttagatattataacaaaacatattcaatatttgtatgctgaaaactataaaatgctggcaaaagaaatcaaagaagttctaagtaaatggagaaacaactgtgttcatggattgcaagactcaacaatgatgtcagttgtcttcaaattaatatacaggtttaacacaaaatctcagcaggattttttgcagatataaatcttattttaaaatttatatggcaaggcaaaggaaatagctaaaacaattttgaaaaagaagaataaattgagaggaatcactctacccttacaaacccatagagtaagctatatgacttactatatagttaccataatcaaggctatgtaatatggtggaggaataaacacatacatcagtgggacagaatagagaatctagaaattgctcccacagttgtacagcctattgcattttgacaaaggtacaaaagcaattcaatggaggaatgatggccttttcaacaaatgggactggaacaactaagaccaccacagaggaaaaaaagaatgaacattaatttgtacaaaaagttgactcaaaatggactgtagatttaactgtaaaatgtaaaactataacatttttagaagataatgtttgaggagataaacttttagaataatttaagagaaaatctttgggacctagggctccatgaagagtttttagacataatacccaaactataatccataaaagaaaaacaattaacaaattgggtttcataaaaaataaaaggttttgctctgtgaaagatctctttaagaggataaaaagataggcaacagactgagagaaaatatttaccaactgaatttctgacaaaggaattatacctagaatatgtaaagattctcaagactcagcagtaaaataatttaacaatccaattagaataatgaacaaaaggcggctgggtgctgtggctcacatctgtaatcccagcactttgggaggccaaggcgggtggatgacctgaggtcaggagtttgagaccagcctggccaacatggcaaaactgcgtctctactaaaaatacaaaaattagctgggtgtggtggtgtgtgcctgtaatcccagctacttgggaggctgaggcaggagaatcacttgaacccagaaagcggaggttgcagtgagccatgatcacaccattgcactccagcctgggtgacaagagtgaaatttcgtctcaaaaaaaaaaaaagaaaaacgagcaaaaggcataaagagaaattttactgaagaggatgtatacataaaaagatgtgcaatatcactagacattaaggaagtacaaattaagaccatggtgagatattactgcacacttataaggatagctaaaattaaaaatattaataatgccaaatgctggagagcatgtagagaaaccagatctctcatgcattgctggtaaaaatgcaaaactacacagtcagccttgaaaatagtttggtatttctttaaaaactaaacatatacttaccatacaacccataaattatactcctggctgtctgtcccagagaagtgaaaacttacgtccacacaaaaacctgtacattgttgttcatagaagatttatttgtaatagcccaaaactgaaaataacccagatgtctttcaataggttcatgattaaacaaactggtatgtctatactatggaatatgacttggcattaaaacggaacagactaatgatacactcaacaactctgatgcatctcaagggcatgatgctgagtgaaaaaaagccattttcagaaggttacatactatatgattctatttgtgtaccattctcaaaaaaataacaaaattatagagaaggaaaacagattagtggttggcaaggattagagatgtgaggaaaggggagtaagtagcaagagggagatctttatgttgatgggataattctgtacgttggttgcagtggtaaatctacacacatgataaaatgacataaaactgtacacacacaacccaaagtcaatgtattgggttttgtgtggtaccataattatagaagatgtgaccattggaggaaactgagtgaagagtacacaggacctttctctactatctttgccacttcctatgaatctataattatttcaaaataaaaatttaacagaagtaacaaagcagaaaccgatagaccaaaagaaagtgatttcacatccaaacatataatcagccccccgtacccccaaatctcacatttgtgaattcaaccaaatacagatcaaaaatttcaggaaaaataatttgttaaatacaatgattaaaaataatacgaattgtaaaaatacataatattatttacattatatagcatgctctaggtattagaagtaatctagagatgatttaaaatatatggggggatgtgcacaggttaggtgcaaatactaggctattttatataaaggacttgagaatctgaagattttggtatcagtctcctgggataccaggggatggctttacctgttgaaccattgacttcttacaacccactcttttctaaaaaggaaaaaataatttctactgtctcattgctattatgactcaggaacattcttccatcatctagttgctgatttttccccttataagtgtgggggaggaaaaggatgtgaggctggaagtggaataagtgaagatttaacatgaacaataagcttcattcatttttaagcaccatctagggcccttcccacccaatatttgttgtgaccactataggaatacaagtgaaagctagcagccaatggcatattcttctccaccacctggaaatagatggggagaggagagaaagcaaggtaagtggagagtaggattatagatatgatagtgacataaacaaagacatatccatagatggatagatgattacttaagtgcttttttgttttgcttttttttttttctgctttttttttttaagagacggggtctcgctattttgctcaggctgttcttaaactcctggcctcaagggatcctcccaccttcacctaccaaagtactggcattacagatataaaccactgcacctggcttatgctaatgttttaaatataaaagcatatatactgggcatggtggctcatggctattatcttagcactttgggaggctgaatcaggagaatcgcttgagcctacgaattaaaggttacagtaagctgtcttcacaccacggcacaccagcctgggtgtcagagtgagaccctgtcaaaaagaaagaaagaaacagaaaaacattagcatcaagagttttctaacccatgttcagcatattactataacttctcctataacattctgacttcctatttgtttacaggtttttgatgggagtggatcatttttgtcctacattaacacatctgctgacccactctatggcccccaaggcctggccctaacttcagatggtcatgttgtggttgcagactctggaaatcactgtttcaaagtctatcgatacttacagtaatggtgggcaggtggatacccgcttccatggtcttgcactataaactggaatggatttctcaatgcgggaccagattatgactagagtttttatgccagaaggaatcattggtgaactttccaaggttatttctgaatgtaacaatttccttaaaaatgacttatccaatttctgtatttcacctttagggttaaaaaaaactcttctactgaatctataaaaactgcagttttacatctgtgaactatggcttaagggacaggatttatgtagctaaactaattttgcaaatcaaacagacacttaaaaaactagcatatgtaaaggtattcgttaatcctgtgaatggtagcttttgcacagaacttccaaaagcaaaacaaaaacaaaatctattgtagttatatacttcatttaacctaggtcacaagacccagggaatcttctaacctcacttttacagtaggtattactcttgtgacatttttttggttatcaacaactaaatataaattactttggaaaaagtaaggctgtcttgcaaaatgatcccagctctgattagcagccctctggagttcagaacttaagtatcagtgcaaatttctcaacctttctgggttagacaaagatccttttttgtgtgttcttttcaccacccctttggctcaccttgtatcagcaaacaaagtacttcttcagggaaacctgaaatttctaatgccttgaaaagcatattacaaaagtaatgctaccttttgggaaacaaactgccccgttaactccagatcattgcactggaatgtaatcaagaaagttagtcatgttttatgtaccatgttttcacacgtgtctcttctcttcgacttcctgaaagcgaaagctttacctcctgcaaatgtcagcacatgtagtaggacaccagtatcctaggacagagagccataagtagccctttggaggactgatggtgtcaaccaaaggcatgtgattgattaatgattcccccttagaaagcaagtgttaccaaagttgtgttatcttgaaagcattacaggtaagggcatgttatggttatttatcattgtttaatgaatagtagaggtgtcaagggactatgtatacatgattagggtaagatagaatgtattatatatatatatatatacacacacacatatatatagctgaatctttggtgtattgaaataggcagcactctgaaagacagaagcttcgtccagccactcttcagcacattcctttactaagcagtttaaagccgtcctagtggagcaagccctaaagcagatttaatttttgccattttccaagaatgacggtggtggcttttagtcagaaaatggccttctgtgctttcaaaaaaaaaaacaaaaaaaaaaccacacacacacataaaaaacccaacaggtcaaaataaaagttgaacttgagttacatttaatttaaatataaatgcattttgagaaatgttaagaacaatttagtcaatcgttcatctgtcattggtactgtaaaataagctgtggtctatttccactgtttaattttctactcagttctaccaaataggatgtcatgtttgacatttttgatagtgactttggggtcttcttcactgaaagcaccttagaactgtactataagaaaacatttcccctatgtataattatatgaatgtgatgtttattgcttattaatttataattcagtcattctctatataggacttcttaaaatttagaagggaaatctagctacttcaaattgtctgttaaatttattatgcccaaatcaacctctgaaaaaaggtttttccaggaagatttacatttaggtttaatatttttttagttaggtagagttttaaaaaatacttgagcctgtccgtgataaagctataaaattcaataactttttagaatgttaaatgaagacactgtttcctaacatcagtgagatacatctttgaatttaaacattcatatttactgagtacctactaggtaccaagtactcttttaggcactggaaatacagtgatggacaaaacaggtaaaaaatcgctgccccctcagagctgacattctggggtgggaatttcattttgccacgtactaacgttctgcacaaaagacaggctagactcttgtctagattgtttaaaagaaacttttcaaattggttacattaattttagtttattttcacaagtaaaaatggctttttatttagattctttctgtcccaggctgttgatcttaaaactagttgatttaaagagtttttttgcacaacatttcaattatatttgtgaacttagaaattaacttacaatctaaccagccatcatatcatatcctatcaggctagatatctcaatagtagactgaatacaaagctaattttttttacatgtcaatattggcacaaactggaatgaaagaatagtttgattcagacctgctccactatgtgttgctaaaacacatgctatgagcactccaggaaacactatattttttccaaaaaatatgtgattatatatgttaaagtatagataacatttcacacttggatacatatgtgcatttactgtatttcttggtaagcatatttttgggggaaagtgctgctgatatgatacaagtagacaaaatttaaatgaaattttgtcacattctatggaaaatggtttctggtaaactgagaaggatattaaaataagtggcttttttctgggctaccattattgtttgatttctctttgtcaagtgtatagaacctgtcatacattcatgataagtagcactgaaaaattactcattcaaatttcccctgggcacgtaaggcaaaatattgccggttgggatttcaaggtcagtgacgacgcatttcctcccagtacagaccccccagccccccttgctggacatggggaggcagagagtcacttgaccatccagaaatacatgactacaagtcctttatgactgtttgccattttttttaatggtacttagtattttgatcaaactttagtctccagaactaaacaagtccctaagtttccttattttaatttactgtgactagatttgaagcaaataaatactccagatccatgcagctagaacacacttgcttccactactaaatatacagggtatgtcctaacatggagttaactggaatagcagtacactagcaagtatctgtgaatccttagcactgacgggttaacagaaatgctttggtaatacctacttagttaattggaggaagtagtaaataaacattaggtaatctgcagattacttcaaatgggaaaaatctttttgtagactctatagtaccctctctattcactagcttctgaaaagggaggagtatttttagtttgacaatttaataatttaaaaacaagacatctccaggtaggaaaaaatgaaagctatttcatgcaaacattatctaatttagcttaaaagtgaaagtggtaatactgttggtttctgtaaatgttgcagggttttaaactttataattactttaatatttttgataactagaaatctagtattgccataaaggaaactaagtgcccatcaaagatttgtttggtataaataaagaattatttgttttgttttcaatgacagtaagctacaaatcatgatgcttaaaaactttctaaagatgaattgtgtggcagtgattggtctgtttgtggagaatgtatgaaagctattaatattctagaatagattaataaattggctatgttgttccaatgaatgtacagcacttccattaacttttgaaagcaacacagccttaaactcaatgcttttgctttatgacatgggaatgttctgtcatcaatggagtgtattcttgtaatagaattctttatatcgttctcaattctatagactttcaagcctatgtatgaatatgaaggggttttttttttttgctttgttttctttttagattttgtacattccatctttataggtctgtttcatatgttttatgtatagaacactaagtcttgcactctctgacattgatactgatatattctcgtcatttgttcttttatgaatcaaaatgttgactgcctatttaaagaaaagaatgaacgctgtgcatcaaagtgtttgtatgttcgtagctacatacgtaccacagtattttggatgctttagtctacaatgaaactttcaattaattctgtcttgaaacataggagaaacaggattcatgtgtatctctttaccatgcacaaaatctcaaatcattataataaagcttgttttctccatttgcagagtgaatatttatttatttaatatttctccatttgcagagtgaatatttatttaatatattctctgcctgaagggaaattgaggaacatcctggaatctgtggaagatagcaatactgcaaccagactatttatactagtgaggaaaagctcaagaaaatttttgttggctatgacattaataatccattagtatttaggatgtatcttaagtaggaatttggaaaatcctgatacatacgtagaacatgtacatttagaaagttatagaagtagaacaaccttaccaaccttttttttttttttttgagacagggtctggctctggctctggctctgttgtccaggctagagtgcagtggtgtgatcatggcttcctgcagcctcgacctccctggctcaagcagtccttccacctcagcctcccaagtagctgggactatagtcactcaccaacacgcctggctaattttttaaattttttctaagagatgcggtcactactttgcccaggatggtctgaactcctgggctcaagcaatctcctgcctgggcttccaaagcgctgggattacaggcgtgattgtgaacaatgacggaacacaataaaaattcgttttgttttcttgagggttaaaaaaaatccagcatagatggaaactctggaagaggttacatgagtcagtcttggaaggagagatgaaacaacagaaattaggaagacctaacatggagctaggcatggcggcagcgcctggagtcacagctgcttgggaggctgaggtgggaggatcacttgagcccagaagtttaagaccagtctgggcaacatagtcaacagactgtctctttaaaaaaagaccaaatgtgacactgctgacgatgaactgtaaatattaatattattgaattctacttccattcttcatttgttttttcttttacccaagcaggccaccatcatgggctccttggaggttttcagaatcagagagagggtgggtccctccataagccacttgcatagttcagcatatctgagattgtcctccaggagcacatttcacatgaagccagatgcatccctttccagaggagagaacgagttcagttttgcctaaggagactggaagggcaagtggacatttgatgttctactcactcttctgtctgtttttcactgttaaagtcactgaccaaacaaacgtctaagcacccttggtccaccagccttttggctaggtggacgggataccgggatgaatactgaagcctgtaccctcacagagcttacagcctgcttggagaaacagaccagatacttacagtaccataaactgctgtattcattagcaaatatttactgagtgtagaatgttcaggtactatgctagtctcactagggaatagcagtaaacaaaaaaagctcctcttctcacagactttcattttactgggatgaaacaaataactgaatacatatagagctagctacataa

SEQ ID NO: 635 - DNA, 27451 bp, Homo sapiens
  source 1..27451: mol_type = genomic DNA
gaatagactcctatattactcataaatgatataagtaatattaaacttggggtctagcttacgtgaccaagataatgatgaaaactttaagttgaaagcttatgttgaaaaacaaaataaaatcatttcatatgcaaattttaacaccacagtcaggaatgtcaatggatatacagggtaaaagaagagagaaaattaacctagatgataaactgtatacattgcatattgattaatctactataaaacaatggcacaagtacatgattgttttgattcttgaaccttgattgattatagatagcatcaaatgtagtatactctgggggagaaaagattggactatgagaggaaattctattttaagctttgtacaattataagacataaggaggacacaaatctcattaagggcagatttgggagagaaacagtgacaaagctaaaaccgtgacttatttgggaaacatcagtgtagcatgataaggacaagccattttatatcactcacatgagcaggcttcatgtcattgggtaaaaattcacagtaatcctggagaaaatgaagaatgtgtgaatcaatgtattgtgtgcaaacggtgatatgagggtagcctgagtcatatgaactccctgggaaaaacgaccagctttgtgtatgtagcaagtggacttggtactcctattacctaaaaagagcctctgcaagtacttattgacaaaagttgacatctactctgcatatggaatagctgtccctgcctctcaggcattttgtaccataaaggccaacagattgccattatcaatattttgatgtcctcaaaacagtttcagtggtaaccacatgatcgtacaagaatacgcctccttcattctgttgccagagaagtacaggaatcttcagttctttgtcttatttggagaaagcattctgctttccagtcttttccagtggagagtaggcctttgttatgggggatgctctgaacatatttcagaatggttcttttactctctctctgccagaaaagaaaggatctttttcttggctttccactatgggaactcactttggtttttggaggtaaattccaagcaagtggggcgggggcggggccctaagtctaggtgctaggagtttctctctctcaagctagtccataatcagcctccggcaatttgtcagaactactatttaagtgttcctaccagtatatgactcaggcaactcctgttttaaattttttttttttttttttttttttttttttttttgagactgagcctcactctgttgcccaggctagagtagtggtgtgatctcggctcactgcaacctctgtctcctgggttcaagcgatcctcctgtctcagcctcccgagtaactgggattacaggcgcccaccaccatgcccggctaatttttgtatttttgtagacagggtttcgacatgttggccaggctggtctcaaactcctgacctcaagtgatccacccgcctcagcctcccaaagtgctgggattacaggtgtgagccactgcgcccgtcctgactcatgcaacttctgcttcaggtaagcagatttaggctgtttattctgtgtttacctgtctctacattttggggtggcagtttttttcctgtgactttatctgatgagacttaggaaagtcattgatttttagttggtttagcttttttttccttttctttcttctttttttttttttttttttttttttgttgagactgagtctcactctgtcgcccaggctggagtgcggcggcgggatctcggctcactgcaacctccgcctcctgggttctatggattctcctgcctcaacctcccaagtaactgggactacaggcgcgcgccactgcacccagctaagcttttgtatttttagtagagacggggtttcaccatgttggccagattggtctcgaattccttggccagactggactctaactcctgaactcgtgatccgcccgcctcagcctcctatagtgctgggattacaggagtgagccactgcgtccagccaagctttttttctcttgtgagggttgcagtaatgagtctcaagctctttacatgttggaactaaaactggaagttcctggtattcttttctacttctgtagtaattctctttctttggaaatcactttctctgtctgcccagctaagtctccatttttcaggttatgggtgcacattatgccttacggtgggaggggcagaagtactgtcatgggctccctctgcaatggtgtttgtcagtgttctcttcctccagattagcttcttctttccattaagtgagaggctctggtagacctcaggaatgaagcaaagcctgttctgctcctacagtgagatagcaaggcaaaagctgctgtgcagtgttcacatagtatatatggtagagtccctgtgtcttttggcatttttgttgccaactatcctttctctgcttctaaactagtaaagcagttactgttctggtcccagctttactagaatatttttagtccccatatcttggtgacctttggtgggggaagcgattccaagttagatacaggcagtttctctatgtgtagacacacattcctatctccagcactcatccatagcaactggaggaaattcacttctatccattttcctttaacccctgcatcccagtcacccctttattgcaatgcccgaggctctggatcactccaggctgctgcactctcttaaattccaggtaactcttttgggatatttatgactttcattttcagggctttgggacctgggagaatggtgtgagtaaagccagagggatctgagaagacagatactttactcctgcactggtgtctctagataatttcccagctggctctctctgcctgtgtaaacaagccttgaggatatgacccttgccaactcttgttagccactcctgtttacatagagctctaagtacatgcccatggaaatagctgcatattcttgaatgactaaacttgctcatttttctgtccaggtcatttctgctatccagaagcacagctcagctgagagtgaggcaccagaagaatgcctaagagtttccaaaagtgatgatttttctaccattaatatattatatgttggtagtatgaaaggaaaataaatcttggagcttcaaaatcactaggccaaatagaaaagtcaagctgggaactgcttagggcaaacctgcctcccattctattcaaagtcatccctctgctcactgacataaatgcctatctgattgactcctttgaaaaggctaatcagaaactcaaaagaatgcaacaggttgtccttcaccaacctgtgacctggaagccccctccctgcttgagttgtcctgccttttcagatggaaccaatgtacatctcacatttattgattgatgtctcatgtctctctaaaatgtatacaaccaagttgtgctctgatcaccttgggcacatgttgtcaggacctcctgaggctgtcagggacacatgtcttcagccttggtaaaataaactttctatattatctgagatctgtctcagattttcggggttcagactagacagttgttaagaaaataacaaaaagacattaaagacatagcatagttgcatgtccattgaactcagagaaatgagttttttaaaaaggaaaaaactcagctgggcgcggtggctcacacctgtaatcccaggacttcgggaggccgaggcaagcagatcatgaggtcaagagtttgagaccatcctggccaacatggtgaaaccctgcctctattaaaaatacaaaaaattagccgggcgttgtggcaggtgcctgtagtcccggctacttgggaggctgaggaaggagaatggcgtgaacccggcaggcggagcttgtagtgagccgagatcacgccactgcactccagcctgggcgacagagcgagactacctctcaaaaaaaaaaaaaagaaaaaaagaaaaattagctggacgtggtggcgcatgcctgtaatcccagctactcaggaggctgaggtaggagaatcgaacctgggaggcggaggttgcggtgagccaagatcatgccattgcactccagtctgggcgacaagaacgaaactccatctcaaaaaaacaaacaaacaaataaaaaaaaccggaaaaaactcaagtgaacaaaatgaatgatgaaaaattgaatgtcatccacacagaactgatgggctaaggtaatatacacatctcaacacatgctttaacaaatctgtctgatgctttactattgtaaatgaaagagtatctgagaaaactctcaatcaatttaggaagtttattttgccaaggttaaggatgcacccatgacagcctcaggaggtcctgacaacatgtacccaaggtggtcagggcacagcttggttttatacatttgagggagatgtgagacatcaatcaatatatgtccgcaaaggcgggacagctgagtccggaagggggtttccaggtcataggtagataaaagacaaacaggttgcattaagcaatagggcaaaggaagtaaccagatattcatttatctcacctgagcaaaggggtgactttgagttctgtctggagctttttttttttttttttttttatcttagtagctgtctttttttggaatagaatgggagccaggtttgccctaaccagttctcaacctgacttttccctttggcttagtgatttttgggtcccgagattttcttcccttttacactatctaaatgtattagttaccaatattgaaataaggaaaagaaatctgaaagtattaggttggtacaaaagtaattgcggttcttgctattataatacttttatttattttgtttatttttatttttttattttttgagacagagtcttgctctgacacccaggctggagtgcagtggtgcgatctcggctcactgcaacctccgcctcccgggttcaagcaattctcctgcctcagcctcctgagtagctgggattacaggcgcatgccaccatgcccggctaattttttttttttttttttgtaattttagtagagacgggggtttcaccatgttagccagggtggtctcgaactcctgaccttgtgatccgcccgcctcaacctcccaaagttctgggattacaggtgtgagccaccacagttggctttataatacttttaatttcaaaagccgcaattacttttgcactaacctgatagtaattgactcccttaaaagtagtcaaagcatattcccaaggtattggatgtggatacatttttgtgggaaagttgttaaacttccaacaagtttataattgtccttgatcaccatgcatgagtcagatggagagggcaaaaatgaaaattgtaccttgtcaggtggtttccaaaggtggcaccttttattatgtaatgtgctctacaggaggtagactaggattgttttgatgcatacagcacagaaaatgaatctatcaacttatattcctcatgaaaatggagcatgctgtttgtggaggcacaatgtggggtcatcctgtgaccaaacgagtggcaactcttgttcaagtttcctcctcgttcggtttgatttcaaggttacctcagtttcaaagcagccctttctgtccagggcacaaaactcctgatttactacttacaactagtggttctcagcctcagattcgcgtaaaaattacctggaagacttttcatttttaaataatgttactgatatatatgttatatgcaataatatgcacccatttactgtgcacagtttgatgagttttgaaaaagttttaccccttttaaagatttagagcatttccaacactcccaaaagttccccaggtcctttgtagccaacttttctcagcaccatccacctctccgccacccatcctccatctcctagcgggtgacatggtactttggtaggtagcacacaagtggatcgttggagctgaaggataattcaaattggtaaactgattcgagggaccatgtgcaaccatgaaagtggtaggagaaggggagttgggtgtttagctggcctgggaggcagggaaggttaaaacagggcttttcaaacacagcactattgatgttttggaatggatcattctttgctgtgggaactgtcccatacattgtagaatgcttagcggcatctgtgacctgtacccactaagatgccagtagcattcccctagttaacaaccaaatatctcttcagacattgccaaatgtgccatctagtgcaaatcctccattctgccctcgagaatcactggattaagagcattaccttctgtccagaggctctaaaggactacacagctcatttcacctagacgctccttccccttttctcttcctgacagccccaaaaatttcactttcatttctcaggcagttcctcctcaggagggagggacttcttcacacagaggaacctcatttgttgaatgaatcctgaccacacccaccctggcttttcttcacctcttcaaccaggagccgagatttctgttgctctgaaggtgtgtggggaggtttgtggggggtagagggtatgagactccaggagaaaagttctcagtgaagttaggggaatttgatttatggccccaagtctcccctgctctgtcgggagcaaaggctagcttgcaggcttcctgctttgagtgcacactgatagcagcctagagtctggggagggacagccttgaaagcagtgttaaagaggcagaaggccgcctttgttttctggggtgtctttttttcctccaggctgaatctatttccattcccttcctattgtataattttgattttctaccttgcaaaggaaacaattctctctctctctttctctctctcaaagagatgaacagaagatctcttattttccacctcctactccctcctcaaaagagaagttggtgaaaggaggtctctgttttccaagtgtgtgcagggcttagctcctagtatgtggcgtcagatagaatggagccatgggagcacggccaggggttgaagtgggttcttttgctgccctcctggcaaccactaaggggctttctgtggccatcctcacgtattcttagtccttggcctccctgacaatagcaggttgagtgatgtgactgccgcacaccgctctgttccctctgttcctatgtctttctgcaggtctcagggctctccttgcacatccctgaacatacctgtttacttttacttcagtaacccatgtgctaccagcgtcttcacctgtctcagaacttgctcctcatcattcttcctcttagacacaccttggcattgatttgtaacctcaatttgttattgcttttctttgctcacaattacttaacagaagttgttcattgtgggctcagaaggagcccacggatttaatcttcttgttaagaatttgatatagagtatgtcctatcttaagctcacttgtgagcaatttgcaccttgattgatatgttacagatattctgacacatgccattctggcctctgctctcacccttcagagttcactgtaactgccatcctgtgtctctgccttactcctgggtagaatccatgtctgcctacatactgactgtctcccagaggcgtctagtcaggcacaagacccaacatatgggataaaattgattataaagcaggctgctaatgtaaaaacgtgcaattagcatccatttaacattcaataaatatgaaatatacgtggaagcctacatccaaatagaaagtgatcatagaccatatcgatgaatgttagagtacacaagaagatgactaatactatggagtaacatcttcaagaagttacattagggtaatgactctgtaaagacctcatgaaggccttgcaactttaaatagtttttatgaaagttttaaatagttttcattgtaagaacacatttgagtagaatcttaagaatgcgaggaaattaaaggctttaatggtttttcccacgggcttaaaaggagaacagtgtggaagattaagatgggagtgtgcctggagaggcataaaaggtgagttcttaccaggcgcggtggttcacgcttgtaatcccagcacttagggaggacaaggcaggaagatcaccagagatcaggagttcaagaccagcctggccaatgtggtgaaactgtgtctctactaaaaaaatgcaaaaattagccgggtgtggtggcggatgcctgtagtcccagctactcgggaggctgaggcaggagaatcagttgaacccaggaggtggaggttgcagtgagccaagatctcgccattgtactccagcctgggggaaaagagcaagactctgtctcaaaaaaaaaaaaaaatatggtgagctctgaggattgaggcagtgggaaggcatgtgtgatgtggacctaactggaccattatgaagtctggcctcgctctgggtggcatgggtttgaacaggagagtgacatgattgacatctgctttaaggtgatcactctgtctactgatgtaagaacagagatgagagcagagtgaagaaggacagtgatgggtgggcacagtagctcacacctgtaatcccagcactgtgggaggccaaggcgggtggatcacctgaggtggatcatgagtttgagaccagcctggccaacatggtgaaactctctctactaaaaatacaaaaattagctgggcgttgtggcaggcacctgtaatcccagctactcgggaggctgaggcaagagaagcgcttgaacccagcaagcagaggttgcagtgagccgagatcatgccaccacactccaacctgggtaacaagagcaaaactccgtctcaaaaaaaaaggaagggcaatgatagtatcagcaagactagtggaagaacaatttcctgaattcaggtggtttctaccagagtggtggcagttgaggtggttggaaactaatttgaaaaaaaactctttcagcatattctcacgaagtaacagacagaaaaagacattagggattgcttaatgaaaatgattctatgttaaaaaatagctttttggagatatattgaccagaacactacagctcttggggagagagtcattaatgtggtatagattgggccctggactctaaggagtagctgaagcaagaactcagtgcacagaggaatggggaggagatgctacaatgtttctgagctctcagggtctctggatgtcaaaacaggctctactttccttattggcagtttctgaccaagaatccagaagaagtgtctaggatattgtctagaaacttcaaaagacatcctcccctaaaagtcactcgtagagacactctaattttactatctacctgcagagagacttaaagtttgcattatcatatccagatgttaggagtccagatgttaggagaagactcaaatgaagggtataatcacctggcagctatggtaaccaggtaacctgggagttctgtcaggccaatggcactcatgttcccttctctacctccctgactgctgctgggcttgagccacactgggaagtggtggggtcatttctcacacgtgggaccgtggttactctgcacttttctcattcttttgccattatggtggcagcagctttggcatcaacatgcatcctcactgtgaacatgaagtcacagcccgtggcagaatgcatgttctactacttcctctcctggagccccccggtatttctaactattggttggatactgattggaataaaagataacaaagaaccccacatctgtggttggctcatggctttagccataaacaggggtgaatattatcatatcatataaactccttgtcttactagtcatcagatcctggtctgaccaatggtcattgtagccaggggctaccagtatatctcttttgtatgatttttagtatctgtaccattggctggatgacactcgccagtcaactttcagctttttttcctccttaaggtcttttgatggatggttagaggagtagacaggtctcgaggcctaggtttatctccatacagcttttattgtaccccatccttttgccaagcgtgggaaagattcctaagttgtcacacatcacagatctttctttcactatcaaacctgttcaattatattagtttcctagcactgttgtaaccaattatcacaaactagatgacttaaaacaacaggaatttgtatcacagctcaggagcccagaagtccaaaaccaagatggcggcaaagttgatttttttttttcagaaggctctatgtgaaaatcggttctattcctctctcctagcttctggtggtttctagcaaacctcggcattctttggcttatatctgtgctattcccatctctgcctctactgtcacatggctttctttcccgtgtgtctgtatgtcttctcctcttataaaaacacaggtcaaggccgggtgcagtggctcacacctgtaatcccagcactttgggaggccgagacaggtggatcacctgaggtcaggagttcaagaccagcatggccaacatggtgaaaccccgtctctactaaaaatctaaaaattagttgggcgtggtggcatacacctgtaatcccagctactcaggagactgaggcaggagaatcgcttgaacctgggaggcgggggttgcagtgagctgagattgtaccattgcattccagcctgggcgacagagcgaaactccatctcaaaaaaaaacaaaaactacaggtcattgaatttagggcctgtctttatccagtatgacctcatcttaacttgattacacctgcaaagatgtgattttcaaataagttcacattcacataagtgaacaatttttgtggagggtataaatctatctactagaacaagtatcaaaatgttactgcctactgagagccaccctttttccctttgcctcacagtttcttgtctaaactgacctcaggttctgagaattggcattgtatcatcatgccactactctgtggtacaccctctggctgaccacaagcaataattgcaggtttgttttgccatttgcactcatgcagcttaactccacagggggaatacaggacaggagatatagcatgcagacagggccgcttcaggtgagctctccgtgaggattcttttgttttgttttgttttttgagacggagtctcgctctgtcgcccgggctggagtgcagtggtgcgatctcggctcactggaagctctgcctcccgggttcacgccattctcctgccttagcctcccgagtagctgggactacaggcgcccgccgccacccctggctaatttttgtatttttagtagagatggggtttcaccttgttagccaggatggtcttgatctccttacctcgtgatccgcctgcctcggcctcccaaagtgctgagattacaggggtgagccaccgcgcccggcctcagtgaggattcttacggtggtacaagaccatgtgaccatgtggatgcgtgtgaaactaacgtagcttaggtaaatcttacatcaacggattgattcccttgtaaagaccatgaacatagcttccagggccctacagagaatattttgttacaagagtctcaatcctcttacggaaaatgaggtctgtgcttaccaaaaagaataaaaataaaataatataccaggggatggtgatggcgatgtgttttttataggaagaaaggacttaagcctaatgataacctttttttcccccacatgtctagtctgacttccaatcttatttcctttaccttaccctacttcccaccctcatctgcttctctctgttaacttgtcctgcatcctcccatccctgcccccacctcctattcattggaaagagactgtcacttttacttcatttaggaagtgtcacatatccaggttcctctaggctcatgtgaggccaaggcctagggctttttgcatatcagccacacatttaaaaactttcgaacatgttatgatgctatgtcctccatgaacggggcattcacttccatgattccttctgcctaaaatatttgttttctttctcattctgtattcctttctcattattcagctttcattaaactcttacttatccaagcaagatatcttggatagttctctatttagcacattatttggtcttctaaaaacctatacctctctatgatggtgttttttacacctaccattttacattttatgaatgattatataattagcttctatcttcttaggtgactgtttactttattctggctaataccatctgttcattactcaactttggattttaatccatttcctgaattttaatcacggaagataatatgtcttcagtgagaatttccaaaataaacacatgaataattggcattcaattagtggatgtggatttaacacagacagaacttcatcgctcctaaatgtggtctccctttatgtattgggacatctctctcatggccaacagccatctccttgctatttctattcctcgatgatctgacattggtatgaatctgtgatctatgtgtaattcagctggttacacccctcccccaacgaatacacacctttgggttcctatcaacctctgtaacatccttcaggccaagaagaaatcctaccatctacaaacacaagacccccccagaaattcccaacttatgtggtttcctccatttctacactctcataaccctggatcccaatctacttctttcaggctttacctcggcttttctttgtttaaataagtggagtagcatggagacctctgaaagagaactctgagggtattatgttcactccaattctaccatcgaattgggtgatctttgtaaatcatttaattttatttattcatctgaagaaagggagtactcttatttctcaagaattttggaaggaggaacaaacaggccaaagtgatttttaaattgtaactggtaatgaaatctccatattgtggtcattgctgtttctgtcggtatctctggaaagtctgtgagggcatgggaggattttgtgtgggtagatgtgttaggaggcgagcacttcttcactggaaaccacatctggggttctaaagttcagctattgaagaatttccaaataatggaaggaagataatgaaacaatgataaagttttagtcatctgtggagagacagggaagttttttttatatgtttatcaaacattgtgcttctctgtgttctaaacactgaggctatagcagtaaaaagacaaaagtgcctaatctacatgtagattatgttttagaaagaagaggtggacatttaaaaatagataatgataataaaagaaagatggcaaatgtacactgaatgatgagtttgtggttgtgctgtacttaagtttgtcttagcagcccttctgatgaagggacatgtaaggagaaagttgaaaaaagtataaacgaaagtcatgcaaatagcaacaggatggtaattctaggctgagtaatgaacaagtgcaaaagccttgaggcattaacagctcgcccagaccactttcagccatttttggtttctcttcctcatcttctttgttctttgatattgcagtctcggccagtctttattgtctgtgcaattagaatgctttttatttgtaccattcttataccatcccctttcaatcttctcagccatccaggggtctttaaccagaagagagaggagagcctcaggagttaggaccagaagaagccagggaagcagtgcaatggcttcaaaaatcttgcttaacgtacaagaggaggtgacctgtcccatctgcctggagctgttgacagaacccttgagtctagactgtggccacagcctctgccgagcctgcatcactgtgagcaacaaggaggcagtgaccagcatgggaggaaaaagcagctgtcctgtgtgtggtatcagttactcatttgaacatctacaggctaatcagcatctggccaacatagtggagagactcaaggaggtcaagttgagcccagacaatgggaagaagagagatctctgtgatcatcatggagagaaactcctactcttctgtaaggaggataggaaagtcatttgctggctttgtgagcggtctcaggagcaccgtggtcaccacacagtcctcacggaggaagtattcaaggaatgtcaggtagggccctagatggagggagatggggcagaagatggtagttggtggaaaatctcaccttttcatccttttttttttttttttttttttgagacagagtctcactctgtcgcccaggctggagtgcagtggcgtgctctcggctcactgcaacctctgccctctgagttcaagtaattttcctgcctcagcctcccaagtagctcggattacaggcgcctgccaccgcgcctggctaattttttttttttttttttggatttttagtagagacgggatttcaccatcttggccaggctggtcttgaactcctaatcttgtgatccacccacctcggcctcccaaagtgctgggattacaggtgtgagccaccatgcccggccttttctttctttttttttttttttttttgtgagcaataaagctttttaatcacctgggtgcaggcggactgagtctgaaaaaggagtcagcccttttcatccttctttaccccctgtggaaccataattctgagtcccgtgatcttctccatgtacatctttcacactgtgctcagcttccaatgcctggggtacactcttgtgtattcctttcatttacataacagatgatcctagagtacagtctcttagccaagaatgagaaatttttgtcttgttttttcctttttcattgtataagtgataaattccttcccaaagttagctctcttgcttctctaagcaggataattgctaaggaacattgtggattgaatgaggaaagagcattgataagaggaaaggactttctgcagggtaaatacttactctaaggaaagacagaatcaggctactccttttgaggggtattgattttcatcacaatgaatgaacaatacattcatctcctcaaaattttccccatgtcatagattctaatcaccagcttcacagtttctgtaaattgcttttttctgggatcaacttgattttttccctgtttgtcctctatccagatactaagaaagcttatagcttgactgtagtgtgattcccttctcataggagaaactccaggcagtcctcaagaggctgaagaaggaagaggaggaagctgagaagctggaagctgacatcagagaagagaaaacttcctggaaggcaagaggagattctgaaggttttctgagacaggaatcttgacaggaccttaatccaaggaggcctcgtcctttttattccttgacattgcatgagtcctgaagccatttgattagttctcttctctgtcctgtccctgttgggggtggaggctagaaagtggacatgttacaattacacatacatacctggaactgagcacaaagatagactctatgatgaggaaggctagcaaatactgtgttccattgctcttttccaacggggctctactacttctggtggaagacactacataaaggactatggttttcctcaagattcaaattaggagtgtggtaaggcaggcagtcatgaatatccaggaaagctatctagaagctaagccttatgttttatattttgtctcagggttggcctagataagacagtttgaggtcattgttttggtaggtactgaaaggaaaatagtaggaaaaaatagcttccctccaagtacctctattgcttctactcccttgctgatttgaactccctgaaaaaaaaaatcgatatatagataatacaaatatatatatacagataatataaatacacacacacacacacacacacacacacacacacacacatatatatatatatatatttccctactggctcctaatcccttgcacaataggccttagcctgacaaacttactacaactctctcttgtccatccttgcagtatcaggtacaaactgagagacaaaggatacaaacagaatttgatcagcttagaagcatcctaaataatgaggagcagagagagctgcaaagattggaagaagaagaaaagaagacgctggataagtttgcagaggctgaggatgagctagttcagcagaagcagttggtgagagagctcatctcagatgtggagtgtcggagtcagtggtcaacaatggagctgctgcaggtaagaaggttcgctcaatctgagattctgggaacacagttccctcctgtgtccttgcgttctcatcctggtggtgacactaaggggtttctttggccttgcagtgccgccttgtcgtccattctagatgtcatggacatgaatgacatttttattaatttatgaagtaagggaatacattttaccttgcagaaaagatccattatatctagttatagtctctaggcccctattatatgtgatctagtgtcaagcattcatcagacttctctttactctggttagtcacaggtaaacacatgcattttcaggtttaagagcatacacatttaagaaatgtgttctatttaagtttaaaatatgcttatttgttatgcaaatgttccctgttaatttttttttttttttttttgagacggagtctcgctctgtctcccaggctggagtgcagtggtgcgatctcggctcactgcaagctccgcctcccaggttcacgccattctcctgcccagcatcccgagtagctgggactacaggcacccaccaccacgtctggctaattttttttgtatttttagtaaacatggggtttcaccgtgctagccagtatggtattaatctcctgacctcgtggtccgcctgcctcggccttccaaaatgctgggattacaggcctgacccaccgcacccagccccctgttacttttttttaaacataaagtgatagaatattgagccttttggggagaaagatggacaaatatatagacagacagtgctctcctttctttgctgaatttccaaatatttcctttttaagatttggaacgaagcaggagagtaactgattttcatttgttgaattgtttgctttgtctctggtgcttatatcccagctttttttaaattcctttttccttttgtcttctttttttgtttaaatttaagattactctggaacagaggttcctaaacgtattttacactcattagtatggctataataaaaaaagatggacaataccaagtgtttgggaagatgtgaagaaattgaaaccttcttgaattgctagtagagatgtaaaatagtaaagctacttaggaaaaactgcttggcagttgctcagaaatgtaaagagagttctcatgtggcctagccattccattcctacctatatacctagaagaactgaatacatatatttgtgcataaacttatatatgaaagttcacagcagtattgttcataaataaaacaactcgtatctccttaaactgatgattggataagcaaaatgtgttatatccaaacaatgtaatattgtttagctgtgaaaaataatgaattaataatacatgctatgacatggatgcaccttgaaaacattataattgaaagaaggcaaacacaagttcttttttgtatgattccatttatatgaaagtctgtaagtagcaaatccgtaatatagaaactagattagtggttgccagagctctggggaagaataggaagtaattgctaattagtgtacaatttctatttgtagtgatgaaaatgatctggatttactgtgcaatgacggttgcactacatcgtgaatattttaaagcctgttaaattgtgcactgtaaagggcaaatcttatggtatttgaactacatctcagtaaaaacaaaaacaaaaaggttccgtaggcccttttttatggttcttccttaagctcttcacaaccctttgaatcgccaccttcacaaaagaacactgtgtttatgtcatttgtccaggcatttgtcctatttcagtcagtcttagttgctatttggtcacttggaatttaaaaaaatattggtagatcaaaaattataaatgctgtgggattaacatttcacttctagatgttagcttcaaagaatggcaaatggaaaacttaggaacttattcttttatctgagtagggactttggctattcctctccaatatgttaagatataatctgttggcggggcgcggtggctcacgcctgtaatcccagcactttgggaggccgaggtgggtggatcacgaggtcaggagatcgagatcatcctggctaacacagtgaaaccccgtctctactaaaaatacaaaaaattagccgggcattttataatatacaaaaaattagctggtgatggcggctgcctgtagtcccagctactcaggaggctgaggcaggagaatggtgtgaacccaggaggcggagcttgcagtgagccaagatggcgccactgcactccagcctgggcgacagagcgagactcagtctaaaaaaaaaagatatgtgctgttgtatttgtggtatgtctcctccacaatcccatctcctgagagtccctgtaacagctttctttctatatggattctcatgatggcgatcgggatggatggtgttatcatatatccattgtttgtttgctagagggactgatactcatttcgtaagagctgcattcaacacttactgccaaagaacgatctagacagaaagacgctcaacttgaaaactgatgcaaaaattagatgagattttaggttgtttcccttataaaggagatactttgatttttaatgctttctgtaatagttttattatatttggccatttttatttttgaaaggatggaatggtaggtagctaaatgagggaaagaagatggcagttactattatttaaaattttttttccaggtttcttaaaattttagattcagggggcacattcaattccatggcatttagtacattcagattgctgtgcaaccattaagtgggatccctctctggactttttcaccatcccaaactgaaactgtacccattaaaaaacagctccccattccctttggtcaccactgctctactttgataaccactattctactttctgtctctatgactttgcctattctaagtacctcatgtaagtggaatcatagaatatttgtcctacaggtttcttataagggtctgttgcataatgctagggtttgggctacatggtactcattatttttgtttcgtcaatatccattccccatttttctggtaataacacctggaattactcttgcaagaaagactagcatgtctatttccatccttgtacttgtttagacctgagaaaatcagcactatcaagaatgaatgagttaattatatgtaaatcagcgtatccaatccttacatccctaccagccacacagtgattattttaagttggacatctgacccaatcctgaatgcttgtgggtgacaaaattgtactgtcattgcagtgaagggaagttctcctttttagcagaaaataatatcagtgaagataattcaaataaagagattcaagttgctatcaactaaaatctgagaatacagtcaaaatatagggaagaaatgagaattaataggcacagagaggccagaattgtgacagaggtttgagcttccagagccatctgtgactaaagtaatacctctctggccacaacccttactttcttcccagttaaggcaattttagttgttgaacaacaaaactatgctaatacagagagcaaaaccatttatttggttgtacaccagctggtgtcatgaaagagttaaagccaaatatattggtacatcttgctcaaaacaaattaacccacagtggtgatgatgggggaatgcagatgactaacagaagttaaggatggactggcttgataaaatgttttagtgtctgggacagggactgagtgaatattgataccagtttgacaatacggcataagaaaggaaacaatatggctggagaacagcttatgttttagatattcttagttactggtgccgttttttcttctttgtggaatgtagtattgtacctgtacagaatgaagtctagctgctttttttcacagtccaatgagatgcagacagacttggaaaagaagggagtttatttttgcaactggttacagggagaaggtcagagtaactatcagaccaactcagagttacaaagttttttttttctggtgcttatatacattttaagctctatgccttcacgtgggagtgcacctacatgcaggagtgtttcaatctatatctatctttaactagggtctggggtctagaaagctttctctagagtcttggaaagtttcttaatcttaaatgggccctggtacaagttgtatgtctaagaatgcttttattattcgatcagactttaaggtatgagaaaacccaggcagggtctttaaagggtttgttttcacatttcagccctggtactcactcaggcaccagcttttccagttctttaatgtttaacttacgcattcatcaaaattatagtaaagggttaagggaaactgattgttctggttgctaatggaaacctgacctgccacagtattatagaaacatgattacagacaaaagacaatgattagatataaaggttgacaaaaaacagcacctatgtgtgagctaaaattaagattggaggccaggcgcggtggctcacacctgtaatcccagcactttgggagaccgaagagggcggatcatgaggtcaggagatcaagaccatcttggctaacacagtgaaaccccgtctctactaaaaatattaaaaattagccgggcatggtggcacgtacctgtagtcccaggtacttgggaggctgaggcagaagaatcgcttgaaccggggaggtggaggttgcagcgagccaagttcgcaccactgcactccagcctgggtgacagagtgagactctatttcaaaaaaaaaaaaaaaaaaaaaaaaaaaagattggaagaggttgcctataggcggtggatagaacaggacttttctgactgtacataagactatgtcatctgtaaaaagagagagatttactattttctttccaatatagaagcttttttaaaaattagtttttattggtacttaataagtatacatatttatagggtacatagattttggcacaggtatacaatgcataataattacatcagtacatcagagtaaatgatgtatccatcacctcaagcatttatcatttgtttgtgttgccaacattcagattatactattttaattattttaaatgcataataaattattgttgactatagtcacactgttgtggtatcaaatactaaatcttattcattctatctaactgccaacatagagccttttatttgttttctgtgactaactgccctgactagaacctccaataccatgttaaatagaagtagtgagagcaaacatccttgtcttttctgatcttcgggaaaaagcattcagtttttcaccacaaagtatgatgttagctgtaggtttttcatagatgtgttttatcaggctgagggacctctcttctattccaagtttgttaccattcctgttttgttttgttttttttatgaaagtgtgctgaattttgctgaatgctttttttcatgtctattgagatcatcatgtggttttcatcctttattttattaatatggtatattacatcaattgatttttttttatgttgaaccaaccttgcatttctgggataaattctacttggccatcaggtataatctttttgctggattgccagatttgattttcttgtatttttgttgaagaattttgtatttatatttataagagatattggtctatggttttcttttcttgtgatgtctttggttcttttatcagggtcctttatcagggtaggatgagcctcatgtaatcaattaggaagtgttccctgctcttctttatttttgaaataacttatgaagttttgatattatttctttttaaacctttagcagaattagccagtgaagccatctgggtgaggccttttctctgtaggaagtctttgaattccaacttaatctcttaacatgttttaggcctattcatattttctatgcgttctttaatgtgtattgatagtttctgtatttctaggaatttgtctgtttcattaagattatctaatttgttggcatacagttgctcattttataatccttttaatttccttaaggtcagtagtaatatcccatctttcattcctgattttttttcttggtgtgtctagctaaatgtttgccaattttgttgacattttcatataactcacttctgatttttccattttttttcctactgttcttctttctttcattagtcttacaccagtctttatacactttgactcatgttttctcttttctttctaggacatgagtggaatcatgaaatggtgcgtatgggtggccaggagtggtgcttgtgagttataaagaagtgtttgtagctattagagttatttggtggtcaattggaataaaaaatctcccagagtagtaaaatttggatgtatcgttatcttaaattgctggtccccgatgagtatttgagtgttccgtaactattaatggactcgatcctatgttagtaaattcagtggttgaagttcagagctacagccaaaaaggatattaaggatgagagcttttactgtcagacttcggtgacttcactcatttaattcatcctctgtccctgcatccagccctggatcttttattttatatgtgtttgtcatacacatggagggccttgtcaaatcctaaaatagggcatggagacagcttctttatatgtactttgcttacttagaaatagaaggtaccggatcattatgcaaggttctctttagatttccaaaagtagactcgagcctcaggacggtagctgtgactctggtgatgataattaatctctgccagttcacacactttagaagctcctatggaaaagtgtagtccttgttccttgtgtctaccattgccaacccacttggaaacatcaagtttcttacaaagacataaaattctaaccatttttagttaggttgtcataacttctcctttgccgagtgttcgtgtttcccaggaatctgaaatctcaaatatgcgccattccactggagttcaggctttgaactcgggcacaggctgacaggatttccctacagagccccgtatcacagtcaggatctacagctcagaataccacatctctggcccctcccagaaggcccactgagatgcagtgagttttccacatatcacataccatttctacaggtagcaaagtcttttcctatcgttttatccaattttttattatttccattagatatcaaaggagggtttaattatttcatttttaaggaagaaactgtgctttcaagaaatgaagaccttctcaaggtcacccagaggataagagggaaagtagacacagtcacatttcttctggatccagggtccggctctcccttctccccctcctcaggctcagggagaagggttcaagtgcatcagtgatgtgaaggagatgaaaccagtgatgtgggagggatggacacaggatgagagatgtgggggtcaaaaaatttttttcatccctaggagtgagatctggaggctgaaaaagccaaaaatggtttccaagaaactgaagactgtattccatgctccagatctgagtaggatgctgcaaatgtttagaggtgaggagaagcagacaaagactgtggatgtgggattgttgtggtgtcaggtaataaactgtctaggtgggataacttaaaattgaggacagaagagaggagggaggtcagagaataaggaatattctgtggtgaagaggatgcatttatatgtaaggaaaaatggctaggtctctggtttatctttttaattcactagctcacagcttcatggtattcccttcccctgtccctactctaaagaatatataggtatcagtgcttactcctttgtttctaatcagcatcactgaatcttttattatttcagaactgacagctgtccggtgctactggggtaagaaaaagttagtctttaaataactgttttccaattacctttcagaagtttatggtttcaatgatatcttctgatcttagcctcatgcattctcagcacctcccaaaacatttgctaaatacatttctccagtgttttacccctccaattcatcagtgcaagtttttcagtcacttcccaagttcgttcatcaccatgtcactagataaacctactccatatctgtcacctaatcatatatatcacacagatgattatattcatatacatatatatatatttttttttttcttgcagtggatgtcacactgaattcagtcaacctaaatttgaatcttgtcctttcagaagatcagagacaagtgatatctgtgccaatttggccttttcagtgttataattatggtgtcttgggatcccaatatttctcctctgggaaacattactgggaagtggacgtgtccaagaaaactgcctggatcctgggggtatactgtagaacatattcccgccatatgaagtatgttgttagaagatgtgcaaatcgtcaaaatctttacaccaaatacagacctctatttggctactgggttatagggttacagaataaatgtaagtatggtgtctttgaagagtctttgtcctctgatcccgaggttttgactctctccatggctgtgcctccctgccgtgttggggttttcctcgactatgaagcaggcattgtctcatttttcaatgtcacaagccatggctccctcatttacaagttctctaaatgttgcttttctcagcctgtttatccatatttcaatccttggaactgtccagctcccatgactctatgcccaccaagctcttgaattttctcatttcttcacctacaaccctttgtcttgacttatctcctgcaactgactcatctgcaacattcacaccattgcttccttgtggtttcccttctttagaacttttactcatccttgagatgtatggtgtatttggcttgagttatgagagatgcttatttattcatttactctttttcatattttcagagaaagttacctaatccctcctaaagacacagcagtatgggtataacatccttgccttcccatttatccatgtttcactttatcactgatatgaagaggcccaaagcctgttagccaccatccatgctacctaggtagtccataggaaccacccccatgaccaccaccaacatcaactaaaggttcttggagggtatgtcagtgtgttgctcaggataccccaggtacatcaaggaatcaaggagaggaaaatatgagcaatatgtgtattcagagtgaagattttatgtccagagtatttgagctcaaaccttgcctgttgttttctaatcatgatgaatactttctcagtttctttttcctgaaatataaattgggatttaagactgtacctaactattaagatcactgtgtaaaactaagtgtctctaaatgtaatgcatcgatttagtgtctggaacataataaatatttgctctcatgattgctaaaaagtgtgagctgtagtaatgtcctgtgcaatagttttgtggccttcagaggaatagtagttgattttactgaagtctcatttttcaagttcccagactccactgttaagaccactccaattttagttttgttttatagaactttttatactgagagtgggactgttttttttcttttttattgtacatatttaagatatatatactatgatgttttgatacacacttacatggtaaagtgattactacagccaagtaaattatacatccactgtatcatatagttaccgtgtgtcgggggggtggtggttagtgcatttaaaatctttcttagcaaattcccagtagacaatacaatattaactagaatccttgaaatagttgggatttttgtcctgcccaaatctcatgttgaaatgtaatccccagtgttggaggtggggcctggtgggaggtgattggatcatgggggcctcatggagggcctcgcaccatccccatggtaatgaatacattcttgctgtgagttcttgggagatctggttatttaagagtgtggcacttcctcctgtctctgtattgttcccactcttgccagagatgttcctgttcctgctaatgttaggataaaaaagtgattatatttgacaaaaaaaatttaagttagtacaacaataaaaaagtacgataggctgggtgccttggctcatgccggtaatcccagccagcactttgggatcccagccagcactttgggaggccgagaagagaggatcacgtgaggtcaggagttcaagactggcctggccaaaattgcaaaaccctgtctctactaaaaatacaaaaattagctggatgtggtggcgagcccctgtaatcccacctacttgggaggctgaggcatgagaatcgcttgaacctgggaggcggaggttgcagtgagctgagattgcaccactgcactccagcctgggcaacaagagcaaaactctgtctcaaaaaaaaaaaaaaaaaactgtgaaaaaagtggtttgttatatagatcaccaaaaaattatgaaacattgtcatacaattcaatgctaggttttaaatctctgtaaaatgaataggttaaaattaacaatcttacaatcaggaagaagcagaaaattccgtagaaccacaataataaaatgatgtaaacattataaaattatatgtgttcaagtgcatagaatgagagtacttttgaaggtctaatgttttgggtcagttctacaatcaggaagaaaaaaagacaggcctacctttccttcttcagaagagagtggggacagaggagatttgatgagggtcaagtctaggaaaagcttcacttttgctcattgtatgttgattctctggatacattcccacctgttctttgccctgatgatgagacttttacccagatgtgacaactgctctcttcatctcatctagtcttctggaaaaaaaaaaaaaatatatatatatata

SEQ ID NO: 636 - DNA, 50760 bp, Homo sapiens
  source 1..50760: mol_type = genomic DNA
ccaatcctccgtccagacttttgtatggacaccccagtcccttctctctctatacctccctccccaagccaccttctaaggcaaggtgatactcacctaatcagtctccttagggaggaactttgacattctttttcttctcagagtttctgtgctattgaaaccctgtagttagagttctgaggctcaataagctttacatgtattcatcagacctaaataaaaacaaagattgtcttctagttatataggtcaaaattacagatacacacacacagctttatacatacatacgtgtaattttaaactgatgaattttaatgatcgtttggcaaaacatgccattatgcaaaggggcttttactcgtataactttatatgtttatttagacattttaattaatacgtctatatggagtacaggtgtattatcagtgtaattaaactctgatatgatattagaaagctacagtacactgcagacaatttacaagggtcatctctggcctggtgttctcaaaggcctccggatttgccgttcatcaggtaagatgaacagctttgcgttgctaccttcaaaaattctttttttttttttttgagagagagtctcgctctgtctccaggctggagtgcaacctccacctcccgggttcaagcgattctcctgcctcagcctcccgagtagctaggaccacaggcgcgcccagctaatttctgtatttttagtagagacagggtttcatcatgttggccgggatggtctcaatctcctgacctcgttatccgcccgcctcggcctcccaaagtgctgggattacaggggtgaaccaccgcgcctggcctcagaaaccatctccatctcccttaccacctgaggggtcactggtgaccacacccatggaatcggctggatctcctgcggggctggacaatttgaccctcctcctccccaggccccgccccttcccccctgagtctttcggcctgggtggaggacgcggctgcttcaagtccttggctctgatccaggccacagattccaggttagtgagcaagtttattttctggccagctaccgctgtccccacttgtctggagagtttgacccgctctgcaggtcgggttgggggtggttcacgggtgaaagaagaatgagggagacttctgcattttcaagtgaactcaagtttgggaagggagcacagaagaggcacctttgcagctgggaataggccgtgtaaagagagttaaacctctattctacaagctgaagtatgtagaggaggcagctctggaaactgctttagggaatcactgcaaaccattttgtcaggcgtggattcagagtcagcatcccttccccccttcccccgttctccccttccccccttcccccttcccccttcccccttcccccttcccctcccccatctccagcctggccgctccaggaagtgagcaccgtttatcccccaccccaggcggcccgactcctcccagaaggagttgggagatgagccttccgcaaactcctgacctgtgggtccgtccgttcaacggccaaaggctggcggaggagggatcccctgcctttctcggaacggaacggagcagagtcgtgcgtggttgagtttagataaaagccgagtgagcgcgctctgttccttaagattagtttaaggtgccttggattgctctgaagagctttgaccacctgatattgcttacatctggaacttcttggcttctcattccccagatgtgcgggtcagagaggtatgtctaccgttctgttgactggctcttattgtcacttctggcagaggtgacagggcagtgaaagagataaggtcctttccctttcggaactcattatatctttatttctttttctttctcactgcaaatgaccccactgaggttagagacattttaatcagtcagtcaatagagacagaaatgtgtggttaggagcatagatgccgcagccagactgcatgtgttcaaatcctgactctgacagacactggctgtgtgcccgaagactgttaacttgacttctttgagctttagtttcttccatctataagatggacggagtaatatgtatatcttagagttttggtgaggattgagtgagacagatttaaacacgtaggaggctgcctgacacaaattatggtcattattactggcaaactccatgcctagctttaaaaaaatgcacaatcaaaacaatttttaaattataggtttctgaaatgcagggggtagaaattcttttgaagtggaaattaaattttttgttttgaaactgattatgttccaattcaaatatttattgagtcctgttagataatcaattgcagataataggttaaatataaccctacacaaagataaaaaaaaatgttattcctaaagtgcaagaactcatgcccaactcacttataaatgcaactgccacctattttattccactttcactagggctcccagctggtggacgggcccgctctgtcattcctaactctgaacccccagcctacaccagccccagtatcccctgctgagtcactgatttttattctgaaagccattttgatatcgatgcaagcttccattctaaaagatgcttcgtatctaaatagcaggccattctctgtccccctccctcttctagctgttttgcaccctaaattgtatccacctgggaaagaaggtcctttatctaaggcagtgcttctgaagccttaatgtgcgtaagaatcacctagagaactttaatattaaagtgcagattctgaatcattccaggaaagactgagattctgcataaagaactccaagtgcttgcagtgttgctagttagcagacctttttcaggcgtctggttctgatttaattggtcccacctggttgtgaatttgggctctttcttctgctaatttgatgcactgggctctgggactgcaggctcttctcgtctgcactcctcacagtcagaatgccttctctcagcccgtccacactgctctggagacttggcctcagttggaaactggcagcctcccatatctcccttgggctgcacttagctgcagtgggcagtcagggcttgctggtgtgtgggcaagggtcacctatgctaactgtatgctcccctccttcacaatttctttcccaagcctcagctttgacaagagacctcaactcttacaaatcttttttctgctcaagaatttttctctgtctaaagagagtattagatgaatatctacagcgcatattagataggaaaaagacatataatgaactagaaatagaatgaagccacatatgtaatgttacatactcaagtagcctcattaaaaataagcgggtgaaattaattttaatacatttcatttaacccaatacatgcaaaatacaattaggacatgtgatcaacataaaaaaattaataagatcctttaacttttttaaactaaatcttcaaaatccaatgtgtattttgtacctaaagcaacccatttctgagtagccacacttcaaatgctcaagagccatatctggctacatgtttgacaacacagttccattatgcttagaagatcagaaaccaagcttttaatttttcttgtatttttttgtttctgtcagtttattgagttctatctagtaagttacaaattgtaagcatacagttctgtgaattttcacagttgcagtcagctgtgtaaccaccaccatgatcatgatacataaagggcatttccctttatgtattcacccttcaaatttccttatgccctttgcagttcaaacttttctcccactcctgggccctggcttccactgatgtactttcaaataccatagctttctcttttctaggatttcacataaatagcatcatacaataacttaaatttgatgtttgggttctttcactttgcatgcttttgagatttatcttgttgtatatattaacagtttaattgtttggtaatatgccactgtatggatacaccacagtttgttcatttaccagttagtgatgtcatggattcttttcagtttgggactattactacattgcatttatgaggcagtagttctccttcaagagaattgggtacgctaaatacagttttgcctgaaatgaaagtgtgcatgtgtttgttggggaggatgaattggaattggactttcaattaaaatataataccaatacaattattatatttatttatttatttatttatttatttatttattttgagacggagtctcgctctgtcgcccaggctggagtgcagtggcacgatctcgactcactgcaagctccaccttccgggttcacgccattctcctgcctcagcctcccgagtagctgggactacaggcatccgccactacacccagctaaatttttgtatttttagtagagacagggtttcaccgtgttagccaggatggtctcgatctcctgaccttgtgatccgcctgcctcagcctcccaaagtgctgggattacaggcttgggccaccgcgcccggccaacacaattattttttaacagtaacactttgataagatagcacatttatttctatactctagtgccaacatcaaggccaactataagctcagcagtaagctataattttcaatccattataaagttaattgatcatttcctgtgttagctgcagtgctaaggtctggggcacctggaagataaatagagcctctattgcctctagagcctctattgcctctattatcaaaggcaatagagccttatagtgcagtgtgctaagtgagatgatgtgggtatggtaggagatattaacaaaggaaataatagtgcagttcccacaggtgtgattaatttggttaaacagactctcagatgataggtaaatacgtctgtaacaccaattagtactaccagttagatgcacagagttcattaatttgttaattatattttgcaccctttatggagatgaggaatataagggagtaataagagctccagctctgcagcctgcgtatctgcattcaacaccggccccgccacttgaaagatctactaaataccagtttatacaactatgagatgagatttaagggacattcataatgttgttatgtggaattattgagttattatgtacaaaataattaaattcttgctgaatacctaatgggctttctgtagatatttgctgtgagcatcgctgctgctaagcatggcaaagctgaagagccaggctagtacttgcagaagcaccacagaacactagatggcagcgccaagaacctgttttcggctcgctagatcccccagcagggccgctaggaggcttatgcttacatcccatgactttttcttacccttatctgagacactttctcaggccctttcttctaaggggagtgttgttattgggaggcagtttgatatactttttaaatccaccaggtcctcaagatgggggtaaattggtacaatttacagggccttgtgttgaggcccacacggactgttttttacatcagtgtacatttacttttgctgggaaaccagccaaagacaagttagagaattctgcctgctccctacgcactgtggcctgttcagaacagcgaggtcacgcctggaaccagggccagagcttcacataggcagtgttagctggctcttctttggtggcccaaacacaactccaggtagacaagcagaacaaatggctcccagtgaaaataactcagtgctggaaacagttttaaaaattttctaaagagtattctcagtgtgattttaaacaatggtaacgtaatttatcaacaactcttccaagaaaaatagacaataaaggtcatatttctcaatgaagatataaggtctcaactgccttaccggccacctctccttacatatggacccccttaggatcctgctgaagtttaagacaggccctggcaaaatcccatcatcaaataggatctctctcatttccatacttcgaaagcacttggtccatgcctgactttcacagcctttaccactgactgtctttggtcaaagttatgagtttgaggacgaagctttgaactagcaccctggaaaggttaggttatgccaattctacaacttacaaggtgcatgattgtgtaaagtcacttaatgtctcttcttattaaagaatggagaatactcttatttatgcagagttgtccatgagggataaagaaagcaagagaatgtgatttctaaatcacaactggttacagaatcatgagttgtaaaaatattacctccccaggctgggcgcagtggctcacgcttgtaatcccagcactttgggaggccaaggcaggcagatcacttgaggtcaggagttcgagatcagcctggccaacatggtaaaaccctgtctctactaaaaatacaaaaattagctgggcatggtggcgctcacctgtaatcccagctactcaggaggctgaggcacgagaatcgcttgaacccgggaggcagaggttgcagtgagccgagatagtgccactgccctccagcctgggcgatagagcaagactcagtttcaacaacaacaaaaaaattaccaccccttattgtggccattgctgtttctttggtttttttctgagaaggcgagcatgtggtgagagggctctatgtggagcagggccgttaagaagtggaagtgttttcacagtcttagagatcagataccagagagtgatgcaaaggtgatggcagagaggtgaaagagctcatggaaaggtcacagatgatcactgtagaggatgagggggttctgaccccctcattcatccaaagttgaggacctatatgtcaggctctatgctagctgccgaagatacaaccatgaacaaaaagtctcagatctcatggagcttacatttcactgcgaggattcaaacaagtaaagatctgtattaagtggtgtaagaagtaaaatagaccgggtgcagtggctcatgcctgtagtcccaaccctttgggaggccaaggcgggcggatcatgaggtcaggagatcgagaccatcctggctaacacagtgaaacctcatctctactaaaaaatacaaaaaaaattagccggacatagtggcaggcacctgtaatcccagctactcgggaggctgaggcaggagaatggcttgaacccaggaggcggagcttgcagtgagtcgagatcacgccactgcactccagcctgggcgacagagcaagaccccctaatgaggtgaatatgtggagagtgattgtatggtggctgtgctctaaatagactagtcagagcagacccttctgataagggaataggtaggaagctagtaagtcatgcagatagcagagtaaagggtcatctttacatcacgaacgacaaatgcaaaaatcctgaggcagcagtgtgttttaggtgcttttaacattgaggatatgttttgggtgagaaaaggtcacacagtctccaggtgcggtggctcatgcctgtaattccagcactgtgagaggccaaggcaggagcatcacttaaggtcaggagttcaagaccaccctggctaacatggtgaaactccatctctactaaaaatacaaaaactagccaggtgttgtggcacgtgcctgtaatcccagctactcaggaggctgaggcaggagaattgcttgaacctgggaggcggagattgcagtgagctgagattgtaccactgcattccagcctgggtgacagagtgagtctccatctcaaaaaagaaaaaaaagaaaagatcacacagacagtgactcacacaggcccctcctttccagggcctcagtttgtctctattcaataggagcaagaggaaattatcactgctttaatatggggagaaattggtgccttgtatgagccgggataaagaacgtattggatatgagaatgagaagcccttgttaccccaggtgtctgacctctttatccaggactgggcagtcagtattcccttattctccctcctttcttaccctgatcctttttttgtttgttcatctacctaggattctacaggcaggaaacatcttagaaatcagggttgggcaggcaggagccaggagagtagctacaatgacttcaccagtactggtggacatacgagaagaggtgacctgccctatctgcctggagctcctaacagaacccctgagcatagactgtggccacagcttctgccaagcctgcatcacaccaaatggcagggaatcagtgattggtcaagaaggggaaagaagctgccctgtgtgccagaccagctaccagccagggaacctgcggcctaatcggcatctggccaacatagtgaggcggctcagagaggtagtgttgggccctgggaagcagctgaaagcagttctttgtgcagaccatggagaaaaactgcagctcttctgtcaggaggatgggaaggtcatttgctggctttgtgagcggtctcaggagcaccgtggtcaccacacgttcctcgtggaggaggttgcccaggagtaccaggtgagaccccaggatggaatgggagacagagaaacagggtctttggcaggttttaacgttttatcatgctctgatctaatctctttgtagtctttatttacctagagaatgaacctggaaactgcctccctgattaagaatagattctttatcatttacttgctattccagattgagtagatagagctgcttggggtaaaaggggtacttggttgattgagtgtggagatatgttggcagggtaggtaaaggaatttatttactcatgtatttattttgagaaggcgtctcgctctgtcgcccaggttggagtgcagtggtgcgatcccggctcactgcaacctccgcctcccgggttcaagcagttctcgtgcctggcctcccaagtagctaggactgtaggtgtgcaccaccatgcccagctaattgtgtgtgtgtgtgcgtgtgtgtgtgtgtttagtagagatggggttttgccatgttgcccaggctgatctcaaactcctgagctcaggcaatccacccgcctcagcctcccaaagtgctgggattacaggcgtgagccacaggtgctttgtggtcaggcaccttcccaagggggatggagaatcagcctatccctgttggttttcatcccatgtatatatataaaagatttgttggccctctcaagttttcatcctaggttaggacaggcttcttttgaggttagcagaatctctgtcccattcattctatgtctgggtactgagtcaactgaaggcttgatcctgcttgacctgatttgttttcttcaaggagaagtttcaggagtctctaaagaagctgaagaacgaggagcaggaagctgagaagctaacagcttttatcagagagaagaaaacatcctggaaggcaagggagactttttctgaagatgtcctggggcaggaatcatggcaggtcataggagctgagggcaaaggagtccttgtcctgtctgtcctctgatgccatgactagaagagcttccctttgcctggtcctccactatattccttccaaacagggggaggagaggaggtaaatagcaaatatatcaaaactgaacctaggagacaatcacatagcagaggaaccatggctaggggtcgccccaattcataattctgggtcttgctctacagtttcagtctctttggcttttcccttgcattcagagtacaaatgcaagggaaaatgcaggtaaggcttgtgaagaagcccagatctgagacaggttagtcacaggccagtgatttccacctcagtactcgaaattggaagaggaggctgatgcagaggtgagggaggcttcctggaatctaaacgtcacccaggaatcacagttgatgtctagatggcctagataaagcagcccggggccaatggtctgggcagagctgaagggagaaaagaaggaaagaacaggctacaaaggctttctcctgcagcatttaccctccctctccctgggaggcttggcccaggaaagcagtcctgagcccaacttccccgcttttaatagaggagaccctcagtgtgaccgactagcagcctctttttcttccctgttcctgaagaatcagatggagcctgagagatgcaggatccagacagagtttaatcagctgcgaaatatcctagacagagtggagcaacgggagctgaaaaagctggaacaggaagagaagaaggggctacgaattatagaagaggctgagaatgatctggtccaccagacccagtcgctgcgagagctcatctcggatctggagcgtcgatgtcaggggtcaacaatggagctgctgcaggtaaggcttgtgaaggagcccagatctgagagtcaaggaaaagagaaactaactttccttcctttctgggacatcagactaccatcgttgcagggacaagagaaaacattcctttggcgctatagtgcctatcccctattaaactgtttagaggtatggagtaaagcgtaagataattcagagtacaaatgcaagggaaagtcccatttttatttataaagggttgtctaaaagtttatttgatgctgtggagaagttctgttgtatccagtgatgttgttctttctttctcagtcttggcactatttacatttctggctggataattctttgctgcgtggggttctcctgtacattgtaggatgcttagcagcgtctctggcctctgctcactagatgtcagcagcaccaccccagatgtgacaaccccaaatttcttcagacattgccacgatagccccagggtgaacacagtgctctcccagttgagaaccactgttcattaggcacctctcgtctctgatgctgtgttgggaatttgccaagtgcttcttacccagcttagtcacaggcacacttacgccaagctaaattcttagagatgatgtattaccagcccttctttgttttcactctcttctctagagcagaatcatttaacatactgtagcaattgatatttgaactggttttgggggtctgggctctggtctgtatgtgtgtaggtcgcagattacaaggtatcaagcctagagagatttgatggagggacttgaactgaggttgaaattctagcagctattttctgcatagaatgaatagtgtggttgtgaatttgaggcatgatgtagcttgtgatattctgtaaccttcagagtgtaagatattctttatattttgtttgtcttcgtgctttcctcttgctccttctttcttggtggaataattgtttatttacatattcttgggtcttagtattagagccatgggtagctactttctgcctgttacagctttttctcattcactgcttcctgctttgcatcttcattttattcttcttgcctttttgtcctcatcattgatattattaccctgatactttctccttcaccttttgttctggctcctcaacagtcctcaaactgtaaatattttttaaatgcaaatgaatcgtcaattcatattgctagtttagacacttccacattcattagtatgactgccccacggacatttaaacttgagtagtcttttctaaaaataaactttctggaattttcccatcacagacattgttctttctcttttccatatctgtgtgaattgttgcccattaagattttatagccaaggccgagcgcggtggctcacgcctgtaatcccagcactttgggaggccgaggcaggcggatcatgaggtcaggagattgagaccatcctggctaacacggtgaaaccccgtctctactaaaaacacaaaaaaattagccgggcgtggtggcgggcgcctgtagtcccagctactcgggaggctgaggcaggagaatggcgcgaacccaggaggcggagcgtgcagtgagccgagatcgcaccactgcactccagcctgggcgacagagcaagactccatctcaaaaaaaaaaaatattttatagccaagataaaagcttcaaaatatggacataaagccaacataagagaagtagccacatgaaatagcacatcgatttgatcatttcagttcctcagtacagccacaatgtaagattgatacaatcctggatatttactgcaaattgacacacacagcacctctaccacattctatgttcaagccagtttgagttgtgcctctatgaaatgccaccataaacagccctaatacagagaaaatagttaatcctgtattatgtggaccaaacttaagcttttcttcggggtcattgagatgtatggagcacaagataaaaagaccaaatagaaaggaataggccaattccacagaaatgagactagcagtggcagtgataaaggtgaacaactggtgaccaaatgaaattgaggatgtgaagtggactgacttgggcaaagataggatgccagggtgaatatatggtagttatttcctattttgtttaaatttggtgacttaagtggttgctagtgtgattcagtaggatggaagggagacaagagttgccgaactaagttcttttaaacatcttgcatttgaggtacctgtgacatatttgctggtgtatatattaatcaaaatcataaggaaagggggctgagcagaagtacagatttgagaatcatcaacatgtgtacattaaaatgaaggaaatggatgaagtcagcaaaggtagggtagaaggttagagaaggtgaagtttgagaaacagccatatataaagtccatgagcctgtatcttcagcaaccagaacaggatgtaagctactcaaggatagaaattatgacttcatcatctgaggttctctaggccaggcacaatgcctgacaaataatacatgctatacatacataacattacacacacatatgcacacacacaatgttgtgaaaatcaagacactgatgagtcaattgagttattttttgatgtcttcacatgggttcttagggacagtctgccctgagttttttctctactttgtggcctccacattaggattatctttatttgtatcatatcatggggtaggggacatggaaggagaaatgtggataagggcatgacctgttactccttgacttaacctgtctttttccttcctaggatgtgagtgatgtcacagaaaggtatgtgtaaggagaacatgaggtagttcccctggactgacaaatgattcctttacccatgatcagtgggaaagggaagaagaatcagagtggggaagattcaagagagtagtcttgaatcgcgcatcacatggagttttggcatccccaaataaaggggatgaactggcctctctggtaggaaaatgtgggtgatgggaggtcagtaggtggggacagtactgttatttagaataaagagttgcagtattgcgccactgcactccagcctgggagacaaagggagactctgcctcaaacaaacaaaaaaaaatgaataaagagttgcagtatcagtgactccccaagtaccctgttagtgtacttttccataaacctctgtgcctgctttcatccctgattcttaagtttatagttacctcaaaatacacaggaattttctttgcccataaatttttttttttttttttttttgagacagagtttcactctgtcgcccaggctggagtgcagtggtgtgatctcggctcactgcaccttcctgcccgtgaattttatcagagtgacattcccatctgcattatttctcaaggtctaagaatttggtcttggcacatctgccttaagtttttctttctcccaggccttgctccctagtagattttcttttgtctcaattccagtaaaaacgtaaacccgagctctggaggataataatttagcccgggaatcaaacatgttctctatcacatactccagagtctcatccaacaaggtgacatgtcaagctgcttgcacacttggttcctccatgctcctcacagacacacgaaatgggaaccctatcgtcccttctgaaatctgtactctccgtttggaggtgaggacatcttttctccagctagtggcataacattcccagagacggcaaatcctaaaatgctgttttgaaggttttctgagaaatcccagggcctaagcccacagactcttctgaagaaaccccttcatttgatactttcaaagccccagcaataggcccctggtgttctgcctgtcaacccagacatcttcaacccctctgattttaaatattttatatctttttttagaggtagcaaaagatttccaagccattattttactgaactgcataacatctctaggacacagaaaaaggaaaattatagtattttctaaaaacaacaacagaaaaacaaaatgagactttaagaagttaaatcttggacaggcgcagtgactcacacctgtaatcccagcactttgggaggctgaggagggcagatcacgaggtcaggagatcaaaaccatcctggctaacatgatgaaaccctatctctactaaatatacaagaaaattagccaggcgtggtggcacgcgcctgtagtcccagctactcagaaggctgaggcaggagaatcgcttgaacctgggaggtggaggttgcagtgagccgagatcgtgccactgcactccagcctgggtgacagagcgagactccttctcaaaaaaaaaagttaaatcttacacaagtttatgtagatggtgagatgatagtttctagtctagctcttctggctccagtgccagggctgtttgcagaatgatgctaagtgtattcagaaaggaggattggaattcatcagtaggcttgggaggtaagggagatgggtggtggaggaacccacagtcagcagtgtgggaactcagaagtcctgtcctttctaggagtgagttctggaccctgaggaagccagaagctctccctacaaagctgagaagtatgttccgagccccagatctgaaaaggatgctgcgagtgtgtagaggtaaggagattcaggggaaagagtttggatgtgaaattactgtcgtgggaagaaataaacgggatagaggctatagtcggtatttgagcatagtggcaaagagggaggtcccagagggagggacatagtgtgctgaagaagatgcggtttgtatttaaggggagatgaaatggccaggtgacatcctcacaggattcctcaccattcccctcaatgtagtaaggagagagataccagacatgagacagttggtcctattcaacattattgactcttttcatcattacagagctgacagatgtccaaagctactggggtaagtagaagccatggcctctttgggctggcacattctgatctcctttcacatgccctccccagacatagccacacagatcctaggtgttgatgcctcccccatccccgccatatagttccagttcctccaaccacttcctgtgtttcctcttctcagcataacgagacccatgtccccgttctcatctgctgatgttgtaccttttcctacagttgacgtgaccctgaatccacacacagctaatttaaatcttgtcctggctaaaaaccggagacaagtgaggtttgtgggagctaaagtatctggaccttcctgtctggaaaagcattatgactgtagtgtcctgggctcccagcacttctcctctggtaagcattactgggaggtagatgtggccaagaagactgcctggatcctgggggtatgcagcaattcactgggacctacattctctttcaaccattttgctcaaaatcacagtgcttactccaggtatcagcctcagagtggatactgggtgattgggttacagcataaccatgaatatagggcctatgaggattcttccccttccctgcttctctccatgacagtgccccctcgccgtgttggggttttcttagattatgaggctggtactgtctccttttataatgtcacaaaccatggcttccccatctacactttctctaaatattactttcccactactctttgtccatattttaatccttgcaactgtgtaattcctatgaccctgcgtcgtccaagctcttgaatattcttctgttcccacccacttctgataagtaccctgaggcttatcagcatgtgattctcccttctgatcttctgtttttctgtgttctcaattcttttgttgttttttggtttttgaatcttttttgagatggaatctcgctctgtcgcccaggctggagtgcactggcgcaatctcggctcactgcaacctctgcctcctgggttcaagcgaacctcctgcctcagcatcccaagtagctgggattacaggcacccaccaccatgcccaactaatttttgtatttttatagagatagggtttcaccgtgttggccaggctgatctcgaactcctgaccgcaagtgatccacccgcctcggtctcccaaagtgctgggattacagatgtgagccgccgcgcccagacagttctttcgttttaaacagttactcagtactaggatgcacccagtggtgagagtaagcatctttgactgatgacaggtcttgaggtggatagggggcgctttcagtattttgccattaagcatagtatttgatgcaggttttttttgattgatgcaggggatcaaatttaggaagttctgatctgttaatttactacaagtttttgtataaaatgaaaactcgtattctacctatgtcttttctgtaaattattgagacaattgtgtatcatttttgttctgttaatgtggcttagtacattgatttacttcaatttgttaccacaacttgctgaaatacaccattattatttgttgtatgcaatactggatttattttgataacgtattgtttagattttgttctcatctatgttaatgaaagaaattggcctgtatttttacattcttgtaatatctttgccaggttctataaaatgcaataataagcaaataaattactttgtttttgtataagtatgtataggattgagctctaaaaccaaaccattataatgataatttgggtagcttcaaactcaaattgaagagagtcttcactacaatcttcactacaacctttggccttcctctctacatttaagagtagcaatagaacaataaaaaaaaatacgtctttcaaattaattgcagtaaaaacaaaagagtagtggggagagaaaaacaatccaatacatatttttctctcagaatagaaagaaaacacaaagagaaaatatgaacaatataaagcacttaaaggaagaggatgatttcttccagcttttccacactctctttatgcgcaggaacaaacagctgttgagtgagctgctatgactttggtagagaggtgcaatatgttttttgaaccagctataaaagaaattaagaggtacatgtgagggtagaaacaaatatcaaggatgagaatggcactggctgtcccatatggtatccaggagccaccaatgtctgttgagtacttcatacatgcctagtctgaattgagatgtgctcaatgtataaaatatataccagatttcaaatacctacttcaaaaaataatgtaaaatatctcactaataacttttcctttgtgtattgcaatgataatatgttggctctattggattaaataaagtatgttattcattttacctgtttcattttacttttttaatgtggatactagaaaccttaaaattacatatgtggcttacattgtatttctattggacaactctggagtagatcctataatgaaatttctgtccctaagtgagccctagtgtaaaagcctatggactcaggatacagaggaggtttcaaggcacatatgtttatctctacagaacctgcaccttcccagctgccctgaggcatttttatggaaggtaatgacagagaaaagaagatctcaacatatctagaagtgtagaaatttggaagatcatagaaagggctcatgaccagagaatgattctgcagactctggcccctgccgttagtcctcagtctgttgggcacttgaagctccttcatggtttgatgaaacactgatttgttatcaaggctcagcttgggtgtctatggtgagataaagtagtgcagattatagtaaaagctcactactggtttgttctaaggcaccgttttataatatttgggagatcatatctgtggaagcccagaggctggatgcaaactccttatcctggtctgcgtttcaattggaagagatataaaaggagatagggccagctgactgggacctatggggctggtggaagttcaggaaagagaaagatctgctggagtagttatccccttcccacttattttcccatataataagtaagttctaggcaaaagagttagcccagctctcttctgtaaactcattttacaagtaaatttactttccaagtgaatttactttataagtaatttttcttttttgtcaccagagttctagggatgtggtatagttatcctaatatttcccaaaatgtgagtgcttgctagagccgatatttaagtttgatgctaacttaaaaagaagattttggaagggagagggactttcttaacagctttattgtgatatttacttctttataagtaaattcacttggagaacccaaagtattgtccagtgaatgactttagataatagtgaaagccaaactaagtacttgctggaattctataggtaagacctggggaaggttgctcaatctgagacttggggacaattattagggtaagttcacagctctgaccttttcttgaggggttatgggggcttgacagaggccttctgttcttgacatgtgatagagtaggctcaactactatgaaaaagaactctaaaaatacataatggatcaaatactaaagaaatgtacttcttgttaatgtaaaacaatcggtcatgagtgtatgtaactggtggtgagtggcactgttccatgtgggattcatgcaccaagcttgctttcatcttgtggcacttgctgtaccccagaatggtaacagcatgaagctggcagaaaggtgaagaaaacttaggggagaaaacgtgctttttaaatccttagttcatagatgggattcgtaatatctgctcattttctattaatgagaatagccatagggctaaacctaactgtaaagattttttaaatgtctagctgtatgcaatcatgtacaatcaaatttcaaggaaaagaaaactcagattttggtggaaactgcctggaaccctaagtaatcctttttcccattatagaggactcaggatctcagcttttttctggaactatgttaattccattctatagcctaaagtttgtaaaagagaactgtattgtcactaaagttctagacatgtggtatagttatcctaatatttcccaacaagcgagtgcttgttagagctggcatgtaagtttgattctaacttaaaaataatctttttaggggaagaggactgtcttaacattattattgtaatataactgacatataatacatttcataaagtatataacttgatacattttgacttgtgaaactcatcaccatcaaggcaataaatcagatggggttcttttttgtatatatagcacttagagctatacatttccttctgtggctttaaatgcatctcacaaattttgatatattctccattctattcaagattctattttcccttttgatttcttctttgaccattgaattatttaaaattatattttttcccaaatctatgaggatgttcatatatctttttgttattggtttataatttaattttaaatggtccagatacagactttatatgacttgaatcctttttaattgtattgagacttgttttacggtaaaggatatgatctatattggtaaatgtttcatttgcacttgaaagaaatgtgtattctgtggtcctggggtacagtgttcaattaacatcatgttagttgatattattcaaatcttctgtatctttactgcttttctatgagagaggggtgttgaaatatacaactatatttgtggatttgcctatttctcctgcaattctatgagattttgctttctgatttttgaagctcttttgtaaggagcatacacatttaggaatgttacatcctgttgatgaactgacacccctttctcattatggaatgaccctctatctctactaatatctttttctccaaattctactttgttaggtattaatttagccactccagctttcttgttttttgttttttttttgttgttgttgttgtttgtttgtttgagatggagtctcgttctgtcatccaggctggagtgcagtggcgtgatcttggctaactgcaacctctgcctcctgggtttaagtgattctcctgcctcagcctcccgagtagctgggattacaggcacctgccaccacgtccggctaatattgtatttttagtagagacggggtttcaccatgttggtcatattggtctcgaactcctgacctcaggtgatccacccgcctcggcctcccaaagtgctggaattaccggcgtgagccaccgtgcccagcccagctttcttttgattattgttttcataacatatcttttcatttttttttttttttttgagacggagtctcgctctgtctcccaggctggagtgacatggcgcagttgagtgacgtggcgcgatctcggctcactgcaagctccgcctcccgggttcacgccattctcctgcctcagcctcccgagtagctgggactacaggcgcccaccaccacgcccggctaatttttttgtatttttagtagaggcggggtttcaccgtgttggccaggatggtctcgatctcctgacttcgtgatccacccgcctcggcctcccaaagtgctgggattacaggcgtgagccaccgcgcccggcctcatctttttacttttaaactatttgtgtcttcgtactccagcctgggcaacaagagcgaaacactgtctcaaaaaaaagaaaagtatttaagtggcatgtagttgctctaggtaaataatatagttatcttcatttttcccaacaagttactgcttgagttggcattttaacttagttttaattaaaatttaaatattttgctactttatattttgtcagaaatgatcttgattccatgggactctcagttttttaaacatttgctgtataactgctttgtgcatacagtctagcccttgccttcacagagactcagtcagttaggggataaaacaaaggcatattctgtgcaaggtttatttcaaccatcttttagaagataaatttggggttttagggttccaagatttgaaacattacatttgattggtgaagggctagttctcaggttctcatggggttgatgtttgaggccgagaataacctttttttttttttttccttgagatggagtctccctcctgttgcccatgctggagtgcagtggcacgatctcggctcactgcaacctctgcctcctgggttcaagcgattctcctgcctcagcctcccaagtacctgggatgaaaggtgcctgccaccttcggctaatttttgtatttttagtagagacagtgtttcaccatgttggccaggctgatctcaaactctcagcctcaggtgatccacctgcctcggcctctcaaagtgctgggattacaggcataagccaccacgcccagctttttttttttttttttaaataaatgcaagcttaggtacaggctcttgtcaaataaggaatcaacaaagaaataaaatattgattcatttttatccatcttgaaaacatactagtatttgaagggcaaataattaaaatatgaaaaacaattagggaaatggagtctattttggaatctttgaaaaagcagaggagaaatgttaggagagaaatcaagatagaactgcaagtttaaggcattattgcctatctcagctaagcattggcctttatttcaagagatcgaaggaaaccctcacatttttgaactgaaagtcaacacatacatttgaatcacacacatttccacctgaccactgagggtacttgtatgaagacagcaactgagttttctatatcgcttcctctgtgtcaatcacgtttctatacattatatatatggactcaatctttttttttttttttttttcaggcagagttttgctcttgttgcccaggctggagtgcaatggcacgatctcggctcactgcaaccttcgcctcccaggttcaagcgattcaccagcctcggcctcccgagtagctgggattacaggcatcaaccaccacgcctgtctaatttttgtgttttttagtagagacggggtttcgccatgttagccaggctggtctcaaactcctgacctcaggtgatccacctgcctcagcctcccaaagtgctggaattacaggcttgggccaccgcgcatggcctgggctcaatctttatagtggtcctatgaaaataggtactgtcattatcctttttttaaaaaaaatgagaaaatggaggtacagtgagatgaaagaatttgctcaaagttggacacatatgaagtggcagaattgacctacaaaacagggcagcaaaattcagaggcaacatttttattcatttctgtctgttagaaatctgaaaaggtcagtgtgtgagtcaaatcctactttgatacctatttttgtaaatgtactttattggaatatcaccatgcttatttatgtatcatctgtgactgctttcaagttacaacagcagtgttgactggttgcaacagagactgcttgacctgcaaatcctaaaatatttactgtttgaccagcctgaccaacatggtgaaaccccatctctactaaaaatacaaaaattagccgggcatggtggcccgcgcctgtaattccagctacttgggaggctgaggcaggggaatcgcttgaacccaggaggcaaaggttgcagtgagccgagatcacaccactgcactccagcctgggcaacagagtgagactccatctcaaaaacaaacaaacaaacaaacaaatagtcaaagtaatgtataatgctcaaaatgtaatcttaggcctaatgaaggaatagactcctatattactcataaatgatataagtaatattaaacttggggtctagcttacgtgaccaagataatgatgaaaactttaagttgaaagcttatgttgaaaaacaaaataaaatcatttcatatgcaaattttaacaccacagtcaggaatgtcaatggatatacagggtaaaagaagagagaaaattaacctagatgataaactgtatacattgcatattgattaatctactataaaacaatggcacaagtacatgattgttttgattcttgaaccttgattgattatagatagcatcaaatgtagtatactctgggggagaaaagattggactatgagaggaaattctattttaagctttgtacaattataagacataaggaggacacaaatctcattaagggcagatttgggagagaaacagtgacaaagctaaaaccgtgacttatttgggaaacatcagtgtagcatgataaggacaagccattttatatcactcacatgagcaggcttcatgtcattgggtaaaaattcacagtaatcctggagaaaatgaagaatgtgtgaatcaatgtattgtgtgcaaacggtgatatgagggtagcctgagtcatatgaactccctgggaaaaacgaccagctttgtgtatgtagcaagtggacttggtactcctattacctaaaaagagcctctgcaagtacttattgacaaaagttgacatctactctgcatatggaatagctgtccctgcctctcaggcattttgtaccataaaggccaacagattgccattatcaatattttgatgtcctcaaaacagtttcagtggtaaccacatgatcgtacaagaatacgcctccttcattctgttgccagagaagtacaggaatcttcagttctttgtcttatttggagaaagcattctgctttccagtcttttccagtggagagtaggcctttgttatgggggatgctctgaacatatttcagaatggttcttttactctctctctgccagaaaagaaaggatctttttcttggctttccactatgggaactcactttggtttttggaggtaaattccaagcaagtggggcgggggcggggccctaagtctaggtgctaggagtttctctctctcaagctagtccataatcagcctccggcaatttgtcagaactactatttaagtgttcctaccagtatatgactcaggcaactcctgttttaaattttttttttttttttttttttttttttttttttgagactgagcctcactctgttgcccaggctagagtagtggtgtgatctcggctcactgcaacctctgtctcctgggttcaagcgatcctcctgtctcagcctcccgagtaactgggattacaggcgcccaccaccatgcccggctaatttttgtatttttgtagacagggtttcgacatgttggccaggctggtctcaaactcctgacctcaagtgatccacccgcctcagcctcccaaagtgctgggattacaggtgtgagccactgcgcccgtcctgactcatgcaacttctgcttcaggtaagcagatttaggctgtttattctgtgtttacctgtctctacattttggggtggcagtttttttcctgtgactttatctgatgagacttaggaaagtcattgatttttagttggtttagcttttttttccttttctttcttctttttttttttttttttttttttttgttgagactgagtctcactctgtcgcccaggctggagtgcggcggcgggatctcggctcactgcaacctccgcctcctgggttctatggattctcctgcctcaacctcccaagtaactgggactacaggcgcgcgccactgcacccagctaagcttttgtatttttagtagagacggggtttcaccatgttggccagattggtctcgaattccttggccagactggactctaactcctgaactcgtgatccgcccgcctcagcctcctatagtgctgggattacaggagtgagccactgcgtccagccaagctttttttctcttgtgagggttgcagtaatgagtctcaagctctttacatgttggaactaaaactggaagttcctggtattcttttctacttctgtagtaattctctttctttggaaatcactttctctgtctgcccagctaagtctccatttttcaggttatgggtgcacattatgccttacggtgggaggggcagaagtactgtcatgggctccctctgcaatggtgtttgtcagtgttctcttcctccagattagcttcttctttccattaagtgagaggctctggtagacctcaggaatgaagcaaagcctgttctgctcctacagtgagatagcaaggcaaaagctgctgtgcagtgttcacatagtatatatggtagagtccctgtgtcttttggcatttttgttgccaactatcctttctctgcttctaaactagtaaagcagttactgttctggtcccagctttactagaatatttttagtccccatatcttggtgacctttggtgggggaagcgattccaagttagatacaggcagtttctctatgtgtagacacacattcctatctccagcactcatccatagcaactggaggaaattcacttctatccattttcctttaacccctgcatcccagtcacccctttattgcaatgcccgaggctctggatcactccaggctgctgcactctcttaaattccaggtaactcttttgggatatttatgactttcattttcagggctttgggacctgggagaatggtgtgagtaaagccagagggatctgagaagacagatactttactcctgcactggtgtctctagataatttcccagctggctctctctgcctgtgtaaacaagccttgaggatatgacccttgccaactcttgttagccactcctgtttacatagagctctaagtacatgcccatggaaatagctgcatattcttgaatgactaaacttgctcatttttctgtccaggtcatttctgctatccagaagcacagctcagctgagagtgaggcaccagaagaatgcctaagagtttccaaaagtgatgatttttctaccattaatatattatatgttggtagtatgaaaggaaaataaatcttggagcttcaaaatcactaggccaaatagaaaagtcaagctgggaactgcttagggcaaacctgcctcccattctattcaaagtcatccctctgctcactgacataaatgcctatctgattgactcctttgaaaaggctaatcagaaactcaaaagaatgcaacaggttgtccttcaccaacctgtgacctggaagccccctccctgcttgagttgtcctgccttttcagatggaaccaatgtacatctcacatttattgattgatgtctcatgtctctctaaaatgtatacaaccaagttgtgctctgatcaccttgggcacatgttgtcaggacctcctgaggctgtcagggacacatgtcttcagccttggtaaaataaactttctatattatctgagatctgtctcagattttcggggttcagactagacagttgttaagaaaataacaaaaagacattaaagacatagcatagttgcatgtccattgaactcagagaaatgagttttttaaaaaggaaaaaactcagctgggcgcggtggctcacacctgtaatcccaggacttcgggaggccgaggcaagcagatcatgaggtcaagagtttgagaccatcctggccaacatggtgaaaccctgcctctattaaaaatacaaaaaattagccgggcgttgtggcaggtgcctgtagtcccggctacttgggaggctgaggaaggagaatggcgtgaacccggcaggcggagcttgtagtgagccgagatcacgccactgcactccagcctgggcgacagagcgagactacctctcaaaaaaaaaaaaaagaaaaaaagaaaaattagctggacgtggtggcgcatgcctgtaatcccagctactcaggaggctgaggtaggagaatcgaacctgggaggcggaggttgcggtgagccaagatcatgccattgcactccagtctgggcgacaagaacgaaactccatctcaaaaaaacaaacaaacaaataaaaaaaaccggaaaaaactcaagtgaacaaaatgaatgatgaaaaattgaatgtcatccacacagaactgatgggctaaggtaatatacacatctcaacacatgctttaacaaatctgtctgatgctttactattgtaaatgaaagagtatctgagaaaactctcaatcaatttaggaagtttattttgccaaggttaaggatgcacccatgacagcctcaggaggtcctgacaacatgtacccaaggtggtcagggcacagcttggttttatacatttgagggagatgtgagacatcaatcaatatatgtccgcaaaggcgggacagctgagtccggaagggggtttccaggtcataggtagataaaagacaaacaggttgcattaagcaatagggcaaaggaagtaaccagatattcatttatctcacctgagcaaaggggtgactttgagttctgtctggagctttttttttttttttttttttatcttagtagctgtctttttttggaatagaatgggagccaggtttgccctaaccagttctcaacctgacttttccctttggcttagtgatttttgggtcccgagattttcttcccttttacactatctaaatgtattagttaccaatattgaaataaggaaaagaaatctgaaagtattaggttggtacaaaagtaattgcggttcttgctattataatacttttatttattttgtttatttttatttttttattttttgagacagagtcttgctctgacacccaggctggagtgcagtggtgcgatctcggctcactgcaacctccgcctcccgggttcaagcaattctcctgcctcagcctcctgagtagctgggattacaggcgcatgccaccatgcccggctaattttttttttttttttttgtaattttagtagagacgggggtttcaccatgttagccagggtggtctcgaactcctgaccttgtgatccgcccgcctcaacctcccaaagttctgggattacaggtgtgagccaccacagttggctttataatacttttaatttcaaaagccgcaattacttttgcactaacctgatagtaattgactcccttaaaagtagtcaaagcatattcccaaggtattggatgtggatacatttttgtgggaaagttgttaaacttccaacaagtttataattgtccttgatcaccatgcatgagtcagatggagagggcaaaaatgaaaattgtaccttgtcaggtggtttccaaaggtggcaccttttattatgtaatgtgctctacaggaggtagactaggattgttttgatgcatacagcacagaaaatgaatctatcaacttatattcctcatgaaaatggagcatgctgtttgtggaggcacaatgtggggtcatcctgtgaccaaacgagtggcaactcttgttcaagtttcctcctcgttcggtttgatttcaaggttacctcagtttcaaagcagccctttctgtccagggcacaaaactcctgatttactacttacaactagtggttctcagcctcagattcgcgtaaaaattacctggaagacttttcatttttaaataatgttactgatatatatgttatatgcaataatatgcacccatttactgtgcacagtttgatgagttttgaaaaagttttaccccttttaaagatttagagcatttccaacactcccaaaagttccccaggtcctttgtagccaacttttctcagcaccatccacctctccgccacccatcctccatctcctagcgggtgacatggtactttggtaggtagcacacaagtggatcgttggagctgaaggataattcaaattggtaaactgattcgagggaccatgtgcaaccatgaaagtggtaggagaaggggagttgggtgtttagctggcctgggaggcagggaaggttaaaacagggcttttcaaacacagcactattgatgttttggaatggatcattctttgctgtgggaactgtcccatacattgtagaatgcttagcggcatctgtgacctgtacccactaagatgccagtagcattcccctagttaacaaccaaatatctcttcagacattgccaaatgtgccatctagtgcaaatcctccattctgccctcgagaatcactggattaagagcattaccttctgtccagaggctctaaaggactacacagctcatttcacctagacgctccttccccttttctcttcctgacagccccaaaaatttcactttcatttctcaggcagttcctcctcaggagggagggacttcttcacacagaggaacctcatttgttgaatgaatcctgaccacacccaccctggcttttcttcacctcttcaaccaggagccgagatttctgttgctctgaaggtgtgtggggaggtttgtggggggtagagggtatgagactccaggagaaaagttctcagtgaagttaggggaatttgatttatggccccaagtctcccctgctctgtcgggagcaaaggctagcttgcaggcttcctgctttgagtgcacactgatagcagcctagagtctggggagggacagccttgaaagcagtgttaaagaggcagaaggccgcctttgttttctggggtgtctttttttcctccaggctgaatctatttccattcccttcctattgtataattttgattttctaccttgcaaaggaaacaattctctctctctctttctctctctcaaagagatgaacagaagatctcttattttccacctcctactccctcctcaaaagagaagttggtgaaaggaggtctctgttttccaagtgtgtgcagggcttagctcctagtatgtggcgtcagatagaatggagccatgggagcacggccaggggttgaagtgggttcttttgctgccctcctggcaaccactaaggggctttctgtggccatcctcacgtattcttagtccttggcctccctgacaatagcaggttgagtgatgtgactgccgcacaccgctctgttccctctgttcctatgtctttctgcaggtctcagggctctccttgcacatccctgaacatacctgtttacttttacttcagtaacccatgtgctaccagcgtcttcacctgtctcagaacttgctcctcatcattcttcctcttagacacaccttggcattgatttgtaacctcaatttgttattgcttttctttgctcacaattacttaacagaagttgttcattgtgggctcagaaggagcccacggatttaatcttcttgttaagaatttgatatagagtatgtcctatcttaagctcacttgtgagcaatttgcaccttgattgatatgttacagatattctgacacatgccattctggcctctgctctcacccttcagagttcactgtaactgccatcctgtgtctctgccttactcctgggtagaatccatgtctgcctacatactgactgtctcccagaggcgtctagtcaggcacaagacccaacatatgggataaaattgattataaagcaggctgctaatgtaaaaacgtgcaattagcatccatttaacattcaataaatatgaaatatacgtggaagcctacatccaaatagaaagtgatcatagaccatatcgatgaatgttagagtacacaagaagatgactaatactatggagtaacatcttcaagaagttacattagggtaatgactctgtaaagacctcatgaaggccttgcaactttaaatagtttttatgaaagttttaaatagttttcattgtaagaacacatttgagtagaatcttaagaatgcgaggaaattaaaggctttaatggtttttcccacgggcttaaaaggagaacagtgtggaagattaagatgggagtgtgcctggagaggcataaaaggtgagttcttaccaggcgcggtggttcacgcttgtaatcccagcacttagggaggacaaggcaggaagatcaccagagatcaggagttcaagaccagcctggccaatgtggtgaaactgtgtctctactaaaaaaatgcaaaaattagccgggtgtggtggcggatgcctgtagtcccagctactcgggaggctgaggcaggagaatcagttgaacccaggaggtggaggttgcagtgagccaagatctcgccattgtactccagcctgggggaaaagagcaagactctgtctcaaaaaaaaaaaaaaatatggtgagctctgaggattgaggcagtgggaaggcatgtgtgatgtggacctaactggaccattatgaagtctggcctcgctctgggtggcatgggtttgaacaggagagtgacatgattgacatctgctttaaggtgatcactctgtctactgatgtaagaacagagatgagagcagagtgaagaaggacagtgatgggtgggcacagtagctcacacctgtaatcccagcactgtgggaggccaaggcgggtggatcacctgaggtggatcatgagtttgagaccagcctggccaacatggtgaaactctctctactaaaaatacaaaaattagctgggcgttgtggcaggcacctgtaatcccagctactcgggaggctgaggcaagagaagcgcttgaacccagcaagcagaggttgcagtgagccgagatcatgccaccacactccaacctgggtaacaagagcaaaactccgtctcaaaaaaaaaggaagggcaatgatagtatcagcaagactagtggaagaacaatttcctgaattcaggtggtttctaccagagtggtggcagttgaggtggttggaaactaatttgaaaaaaaactctttcagcatattctcacgaagtaacagacagaaaaagacattagggattgcttaatgaaaatgattctatgttaaaaaatagctttttggagatatattgaccagaacactacagctcttggggagagagtcattaatgtggtatagattgggccctggactctaaggagtagctgaagcaagaactcagtgcacagaggaatggggaggagatgctacaatgtttctgagctctcagggtctctggatgtcaaaacaggctctactttccttattggcagtttctgaccaagaatccagaagaagtgtctaggatattgtctagaaacttcaaaagacatcctcccctaaaagtcactcgtagagacactctaattttactatctacctgcagagagacttaaagtttgcattatcatatccagatgttaggagtccagatgttaggagaagactcaaatgaagggtataatcacctggcagctatggtaaccaggtaacctgggagttctgtcaggccaatggcactcatgttcccttctctacctccctgactgctgctgggcttgagccacactgggaagtggtggggtcatttctcacacgtgggaccgtggttactctgcacttttctcattcttttgccattatggtggcagcagctttggcatcaacatgcatcctcactgtgaacatgaagtcacagcccgtggcagaatgcatgttctactacttcctctcctggagccccccggtatttctaactattggttggatactgattggaataaaagataacaaagaaccccacatctgtggttggctcatggctttagccataaacaggggtgaatattatcatatcatataaactccttgtcttactagtcatcagatcctggtctgaccaatggtcattgtagccaggggctaccagtatatctcttttgtatgatttttagtatctgtaccattggctggatgacactcgccagtcaactttcagctttttttcctccttaaggtcttttgatggatggttagaggagtagacaggtctcgaggcctaggtttatctccatacagcttttattgtaccccatccttttgccaagcgtgggaaagattcctaagttgtcacacatcacagatctttctttcactatcaaacctgttcaattatattagtttcctagcactgttgtaaccaattatcacaaactagatgacttaaaacaacaggaatttgtatcacagctcaggagcccagaagtccaaaaccaagatggcggcaaagttgatttttttttttcagaaggctctatgtgaaaatcggttctattcctctctcctagcttctggtggtttctagcaaacctcggcattctttggcttatatctgtgctattcccatctctgcctctactgtcacatggctttctttcccgtgtgtctgtatgtcttctcctcttataaaaacacaggtcaaggccgggtgcagtggctcacacctgtaatcccagcactttgggaggccgagacaggtggatcacctgaggtcaggagttcaagaccagcatggccaacatggtgaaaccccgtctctactaaaaatctaaaaattagttgggcgtggtggcatacacctgtaatcccagctactcaggagactgaggcaggagaatcgcttgaacctgggaggcgggggttgcagtgagctgagattgtaccattgcattccagcctgggcgacagagcgaaactccatctcaaaaaaaaacaaaaactacaggtcattgaatttagggcctgtctttatccagtatgacctcatcttaacttgattacacctgcaaagatgtgattttcaaataagttcacattcacataagtgaacaatttttgtggagggtataaatctatctactagaacaagtatcaaaatgttactgcctactgagagccaccctttttccctttgcctcacagtttcttgtctaaactgacctcaggttctgagaattggcattgtatcatcatgccactactctgtggtacaccctctggctgaccacaagcaataattgcaggtttgttttgccatttgcactcatgcagcttaactccacagggggaatacaggacaggagatatagcatgcagacagggccgcttcaggtgagctctccgtgaggattcttttgttttgttttgttttttgagacggagtctcgctctgtcgcccgggctggagtgcagtggtgcgatctcggctcactggaagctctgcctcccgggttcacgccattctcctgccttagcctcccgagtagctgggactacaggcgcccgccgccacccctggctaatttttgtatttttagtagagatggggtttcaccttgttagccaggatggtcttgatctccttacctcgtgatccgcctgcctcggcctcccaaagtgctgagattacaggggtgagccaccgcgcccggcctcagtgaggattcttacggtggtacaagaccatgtgaccatgtggatgcgtgtgaaactaacgtagcttaggtaaatcttacatcaacggattgattcccttgtaaagaccatgaacatagcttccagggccctacagagaatattttgttacaagagtctcaatcctcttacggaaaatgaggtctgtgcttaccaaaaagaataaaaataaaataatataccaggggatggtgatggcgatgtgttttttataggaagaaaggacttaagcctaatgataacctttttttcccccacatgtctagtctgacttccaatcttatttcctttaccttaccctacttcccaccctcatctgcttctctctgttaacttgtcctgcatcctcccatccctgcccccacctcctattcattggaaagagactgtcacttttacttcatttaggaagtgtcacatatccaggttcctctaggctcatgtgaggccaaggcctagggctttttgcatatcagccacacatttaaaaactttcgaacatgttatgatgctatgtcctccatgaacggggcattcacttccatgattccttctgcctaaaatatttgttttctttctcattctgtattcctttctcattattcagctttcattaaactcttacttatccaagcaagatatcttggatagttctctatttagcacattatttggtcttctaaaaacctatacctctctatgatggtgttttttacacctaccattttacattttatgaatgattatataattagcttctatcttcttaggtgactgtttactttattctggctaataccatctgttcattactcaactttggattttaatccatttcctgaattttaatcacggaagataatatgtcttcagtgagaatttccaaaataaacacatgaataattggcattcaattagtggatgtggatttaacacagacagaacttcatcgctcctaaatgtggtctccctttatgtattgggacatctctctcatggccaacagccatctccttgctatttctattcctcgatgatctgacattggtatgaatctgtgatctatgtgtaattcagctggttacacccctcccccaacgaatacacacctttgggttcctatcaacctctgtaacatccttcaggccaagaagaaatcctaccatctacaaacacaagacccccccagaaattcccaacttatgtggtttcctccatttctacactctcataaccctggatcccaatctacttctttcaggctttacctcggcttttctttgtttaaataagtggagtagcatggagacctctgaaagagaactctgagggtattatgttcactccaattctaccatcgaattgggtgatctttgtaaatcatttaattttatttattcatctgaagaaagggagtactcttatttctcaagaattttggaaggaggaacaaacaggccaaagtgatttttaaattgtaactggtaatgaaatctccatattgtggtcattgctgtttctgtcggtatctctggaaagtctgtgagggcatgggaggattttgtgtgggtagatgtgttaggaggcgagcacttcttcactggaaaccacatctggggttctaaagttcagctattgaagaatttccaaataatggaaggaagataatgaaacaatgataaagttttagtcatctgtggagagacagggaagttttttttatatgtttatcaaacattgtgcttctctgtgttctaaacactgaggctatagcagtaaaaagacaaaagtgcctaatctacatgtagattatgttttagaaagaagaggtggacatttaaaaatagataatgataataaaagaaagatggcaaatgtacactgaatgatgagtttgtggttgtgctgtacttaagtttgtcttagcagcccttctgatgaagggacatgtaaggagaaagttgaaaaaagtataaacgaaagtcatgcaaatagcaacaggatggtaattctaggctgagtaatgaacaagtgcaaaagccttgaggcattaacagctcgcccagaccactttcagccatttttggtttctcttcctcatcttctttgttctttgatattgcagtctcggccagtctttattgtctgtgcaattagaatgctttttatttgtaccattcttataccatcccctttcaatcttctcagccatccaggggtctttaaccagaagagagaggagagcctcaggagttaggaccagaagaagccagggaagcagtgcaatggcttcaaaaatcttgcttaacgtacaagaggaggtgacctgtcccatctgcctggagctgttgacagaacccttgagtctagactgtggccacagcctctgccgagcctgcatcactgtgagcaacaaggaggcagtgaccagcatgggaggaaaaagcagctgtcctgtgtgtggtatcagttactcatttgaacatctacaggctaatcagcatctggccaacatagtggagagactcaaggaggtcaagttgagcccagacaatgggaagaagagagatctctgtgatcatcatggagagaaactcctactcttctgtaaggaggataggaaagtcatttgctggctttgtgagcggtctcaggagcaccgtggtcaccacacagtcctcacggaggaagtattcaaggaatgtcaggtagggccctagatggagggagatggggcagaagatggtagttggtggaaaatctcaccttttcatccttttttttttttttttttttttgagacagagtctcactctgtcgcccaggctggagtgcagtggcgtgctctcggctcactgcaacctctgccctctgagttcaagtaattttcctgcctcagcctcccaagtagctcggattacaggcgcctgccaccgcgcctggctaattttttttttttttttttggatttttagtagagacgggatttcaccatcttggccaggctggtcttgaactcctaatcttgtgatccacccacctcggcctcccaaagtgctgggattacaggtgtgagccaccatgcccggccttttctttctttttttttttttttttttgtgagcaataaagctttttaatcacctgggtgcaggcggactgagtctgaaaaaggagtcagcccttttcatccttctttaccccctgtggaaccataattctgagtcccgtgatcttctccatgtacatctttcacactgtgctcagcttccaatgcctggggtacactcttgtgtattcctttcatttacataacagatgatcctagagtacagtctcttagccaagaatgagaaatttttgtcttgttttttcctttttcattgtataagtgataaattccttcccaaagttagctctcttgcttctctaagcaggataattgctaaggaacattgtggattgaatgaggaaagagcattgataagaggaaaggactttctgcagggtaaatacttactctaaggaaagacagaatcaggctactccttttgaggggtattgattttcatcacaatgaatgaacaatacattcatctcctcaaaattttccccatgtcatagattctaatcaccagcttcacagtttctgtaaattgcttttttctgggatcaacttgattttttccctgtttgtcctctatccagatactaagaaagcttatagcttgactgtagtgtgattcccttctcataggagaaactccaggcagtcctcaagaggctgaagaaggaagaggaggaagctgagaagctggaagctgacatcagagaagagaaaacttcctggaaggcaagaggagattctgaaggttttctgagacaggaatcttgacaggaccttaatccaaggaggcctcgtcctttttattccttgacattgcatgagtcctgaagccatttgattagttctcttctctgtcctgtccctgttgggggtggaggctagaaagtggacatgttacaattacacatacatacctggaactgagcacaaagatagactctatgatgaggaaggctagcaaatactgtgttccattgctcttttccaacggggctctactacttctggtggaagacactacataaaggactatggttttcctcaagattcaaattaggagtgtggtaaggcaggcagtcatgaatatccaggaaagctatctagaagctaagccttatgttttatattttgtctcagggttggcctagataagacagtttgaggtcattgttttggtaggtactgaaaggaaaatagtaggaaaaaatagcttccctccaagtacctctattgcttctactcccttgctgatttgaactccctgaaaaaaaaaatcgatatatagataatacaaatatatatatacagataatataaatacacacacacacacacacacacacacacacacacacacatatatatatatatatatttccctactggctcctaatcccttgcacaataggccttagcctgacaaacttactacaactctctcttgtccatccttgcagtatcaggtacaaactgagagacaaaggatacaaacagaatttgatcagcttagaagcatcctaaataatgaggagcagagagagctgcaaagattggaagaagaagaaaagaagacgctggataagtttgcagaggctgaggatgagctagttcagcagaagcagttggtgagagagctcatctcagatgtggagtgtcggagtcagtggtcaacaatggagctgctgcaggtaagaaggttcgctcaatctgagattctgggaacacagttccctcctgtgtccttgcgttctcatcctggtggtgacactaaggggtttctttggccttgcagtgccgccttgtcgtccattctagatgtcatggacatgaatgacatttttattaatttatgaagtaagggaatacattttaccttgcagaaaagatccattatatctagttatagtctctaggcccctattatatgtgatctagtgtcaagcattcatcagacttctctttactctggttagtcacaggtaaacacatgcattttcaggtttaagagcatacacatttaagaaatgtgttctatttaagtttaaaatatgcttatttgttatgcaaatgttccctgttaatttttttttttttttttttgagacggagtctcgctctgtctcccaggctggagtgcagtggtgcgatctcggctcactgcaagctccgcctcccaggttcacgccattctcctgcccagcatcccgagtagctgggactacaggcacccaccaccacgtctggctaattttttttgtatttttagtaaacatggggtttcaccgtgctagccagtatggtattaatctcctgacctcgtggtccgcctgcctcggccttccaaaatgctgggattacaggcctgacccaccgcacccagccccctgttacttttttttaaacataaagtgatagaatattgagccttttggggagaaagatggacaaatatatagacagacagtgctctcctttctttgctgaatttccaaatatttcctttttaagatttggaacgaagcaggagagtaactgattttcatttgttgaattgtttgctttgtctctggtgcttatatcccagctttttttaaattcctttttccttttgtcttctttttttgtttaaatttaagattactctggaacagaggttcctaaacgtattttacactcattagtatggctataataaaaaaagatggacaataccaagtgtttgggaagatgtgaagaaattgaaaccttcttgaattgctagtagagatgtaaaatagtaaagctacttaggaaaaactgcttggcagttgctcagaaatgtaaagagagttctcatgtggcctagccattccattcctacctatatacctagaagaactgaatacatatatttgtgcataaacttatatatgaaagttcacagcagtattgttcataaataaaacaactcgtatctccttaaactgatgattggataagcaaaatgtgttatatccaaacaatgtaatattgtttagctgtgaaaaataatgaattaataatacatgctatgacatggatgcaccttgaaaacattataattgaaagaaggcaaacacaagttcttttttgtatgattccatttatatgaaagtctgtaagtagcaaatccgtaatatagaaactagattagtggttgccagagctctggggaagaataggaagtaattgctaattagtgtacaatttctatttgtagtgatgaaaatgatctggatttactgtgcaatgacggttgcactacatcgtgaatattttaaagcctgttaaattgtgcactgtaaagggcaaatcttatggtatttgaactacatctcagtaaaaacaaaaacaaaaaggttccgtaggcccttttttatggttcttccttaagctcttcacaaccctttgaatcgccaccttcacaaaagaacactgtgtttatgtcatttgtccaggcatttgtcctatttcagtcagtcttagttgctatttggtcacttggaatttaaaaaaatattggtagatcaaaaattataaatgctgtgggattaacatttcacttctagatgttagcttcaaagaatggcaaatggaaaacttaggaacttattcttttatctgagtagggactttggctattcctctccaatatgttaagatataatctgttggcggggcgcggtggctcacgcctgtaatcccagcactttgggaggccgaggtgggtggatcacgaggtcaggagatcgagatcatcctggctaacacagtgaaaccccgtctctactaaaaatacaaaaaattagccgggcattttataatatacaaaaaattagctggtgatggcggctgcctgtagtcccagctactcaggaggctgaggcaggagaatggtgtgaacccaggaggcggagcttgcagtgagccaagatggcgccactgcactccagcctgggcgacagagcgagactcagtctaaaaaaaaaagatatgtgctgttgtatttgtggtatgtctcctccacaatcccatctcctgagagtccctgtaacagctttctttctatatggattctcatgatggcgatcgggatggatggtgttatcatatatccattgtttgtttgctagagggactgatactcatttcgtaagagctgcattcaacacttactgccaaagaacgatctagacagaaagacgctcaacttgaaaactgatgcaaaaattagatgagattttaggttgtttcccttataaaggagatactttgatttttaatgctttctgtaatagttttattatatttggccatttttatttttgaaaggatggaatggtaggtagctaaatgagggaaagaagatggcagttactattatttaaaattttttttccaggtttcttaaaattttagattcagggggcacattcaattccatggcatttagtacattcagattgctgtgcaaccattaagtgggatccctctctggactttttcaccatcccaaactgaaactgtacccattaaaaaacagctccccattccctttggtcaccactgctctactttgataaccactattctactttctgtctctatgactttgcctattctaagtacctcatgtaagtggaatcatagaatatttgtcctacaggtttcttataagggtctgttgcataatgctagggtttgggctacatggtactcattatttttgtttcgtcaatatccattccccatttttctggtaataacacctggaattactcttgcaagaaagactagcatgtctatttccatccttgtacttgtttagacctgagaaaatcagcactatcaagaatgaatgagttaattatatgtaaatcagcgtatccaatccttacatccctaccagccacacagtgattattttaagttggacatctgacccaatcctgaatgcttgtgggtgacaaaattgtactgtcattgcagtgaagggaagttctcctttttagcagaaaataatatcagtgaagataattcaaataaagagattcaagttgctatcaactaaaatctgagaatacagtcaaaatatagggaagaaatgagaattaataggcacagagaggccagaattgtgacagaggtttgagcttccagagccatctgtgactaaagtaatacctctctggccacaacccttactttcttcccagttaaggcaattttagttgttgaacaacaaaactatgctaatacagagagcaaaaccatttatttggttgtacaccagctggtgtcatgaaagagttaaagccaaatatattggtacatcttgctcaaaacaaattaacccacagtggtgatgatgggggaatgcagatgactaacagaagttaaggatggactggcttgataaaatgttttagtgtctgggacagggactgagtgaatattgataccagtttgacaatacggcataagaaaggaaacaatatggctggagaacagcttatgttttagatattcttagttactggtgccgttttttcttctttgtggaatgtagtattgtacctgtacagaatgaagtctagctgctttttttcacagtccaatgagatgcagacagacttggaaaagaagggagtttatttttgcaactggttacagggagaaggtcagagtaactatcagaccaactcagagttacaaagttttttttttctggtgcttatatacattttaagctctatgccttcacgtgggagtgcacctacatgcaggagtgtttcaatctatatctatctttaactagggtctggggtctagaaagctttctctagagtcttggaaagtttcttaatcttaaatgggccctggtacaagttgtatgtctaagaatgcttttattattcgatcagactttaaggtatgagaaaacccaggcagggtctttaaagggtttgttttcacatttcagccctggtactcactcaggcaccagcttttccagttctttaatgtttaacttacgcattcatcaaaattatagtaaagggttaagggaaactgattgttctggttgctaatggaaacctgacctgccacagtattatagaaacatgattacagacaaaagacaatgattagatataaaggttgacaaaaaacagcacctatgtgtgagctaaaattaagattggaggccaggcgcggtggctcacacctgtaatcccagcactttgggagaccgaagagggcggatcatgaggtcaggagatcaagaccatcttggctaacacagtgaaaccccgtctctactaaaaatattaaaaattagccgggcatggtggcacgtacctgtagtcccaggtacttgggaggctgaggcagaagaatcgcttgaaccggggaggtggaggttgcagcgagccaagttcgcaccactgcactccagcctgggtgacagagtgagactctatttcaaaaaaaaaaaaaaaaaaaaaaaaaaaagattggaagaggttgcctataggcggtggatagaacaggacttttctgactgtacataagactatgtcatctgtaaaaagagagagatttactattttctttccaatatagaagcttttttaaaaattagtttttattggtacttaataagtatacatatttatagggtacatagattttggcacaggtatacaatgcataataattacatcagtacatcagagtaaatgatgtatccatcacctcaagcatttatcatttgtttgtgttgccaacattcagattatactattttaattattttaaatgcataataaattattgttgactatagtcacactgttgtggtatcaaatactaaatcttattcattctatctaactgccaacatagagccttttatttgttttctgtgactaactgccctgactagaacctccaataccatgttaaatagaagtagtgagagcaaacatccttgtcttttctgatcttcgggaaaaagcattcagtttttcaccacaaagtatgatgttagctgtaggtttttcatagatgtgttttatcaggctgagggacctctcttctattccaagtttgttaccattcctgttttgttttgttttttttatgaaagtgtgctgaattttgctgaatgctttttttcatgtctattgagatcatcatgtggttttcatcctttattttattaatatggtatattacatcaattgatttttttttatgttgaaccaaccttgcatttctgggataaattctacttggccatcaggtataatctttttgctggattgccagatttgattttcttgtatttttgttgaagaattttgtatttatatttataagagatattggtctatggttttcttttcttgtgatgtctttggttcttttatcagggtcctttatcagggtaggatgagcctcatgtaatcaattaggaagtgttccctgctcttctttatttttgaaataacttatgaagttttgatattatttctttttaaacctttagcagaattagccagtgaagccatctgggtgaggccttttctctgtaggaagtctttgaattccaacttaatctcttaacatgttttaggcctattcatattttctatgcgttctttaatgtgtattgatagtttctgtatttctaggaatttgtctgtttcattaagattatctaatttgttggcatacagttgctcattttataatccttttaatttccttaaggtcagtagtaatatcccatctttcattcctgattttttttcttggtgtgtctagctaaatgtttgccaattttgttgacattttcatataactcacttctgatttttccattttttttcctactgttcttctttctttcattagtcttacaccagtctttatacactttgactcatgttttctcttttctttctaggacatgagtggaatcatgaaatggtgcgtatgggtggccaggagtggtgcttgtgagttataaagaagtgtttgtagctattagagttatttggtggtcaattggaataaaaaatctcccagagtagtaaaatttggatgtatcgttatcttaaattgctggtccccgatgagtatttgagtgttccgtaactattaatggactcgatcctatgttagtaaattcagtggttgaagttcagagctacagccaaaaaggatattaaggatgagagcttttactgtcagacttcggtgacttcactcatttaattcatcctctgtccctgcatccagccctggatcttttattttatatgtgtttgtcatacacatggagggccttgtcaaatcctaaaatagggcatggagacagcttctttatatgtactttgcttacttagaaatagaaggtaccggatcattatgcaaggttctctttagatttccaaaagtagactcgagcctcaggacggtagctgtgactctggtgatgataattaatctctgccagttcacacactttagaagctcctatggaaaagtgtagtccttgttccttgtgtctaccattgccaacccacttggaaacatcaagtttcttacaaagacataaaattctaaccatttttagttaggttgtcataacttctcctttgccgagtgttcgtgtttcccaggaatctgaaatctcaaatatgcgccattccactggagttcaggctttgaactcgggcacaggctgacaggatttccctacagagccccgtatcacagtcaggatctacagctcagaataccacatctctggcccctcccagaaggcccactgagatgcagtgagttttccacatatcacataccatttctacaggtagcaaagtcttttcctatcgttttatccaattttttattatttccattagatatcaaaggagggtttaattatttcatttttaaggaagaaactgtgctttcaagaaatgaagaccttctcaaggtcacccagaggataagagggaaagtagacacagtcacatttcttctggatccagggtccggctctcccttctccccctcctcaggctcagggagaagggttcaagtgcatcagtgatgtgaaggagatgaaaccagtgatgtgggagggatggacacaggatgagagatgtgggggtcaaaaaatttttttcatccctaggagtgagatctggaggctgaaaaagccaaaaatggtttccaagaaactgaagactgtattccatgctccagatctgagtaggatgctgcaaatgtttagaggtgaggagaagcagacaaagactgtggatgtgggattgttgtggtgtcaggtaataaactgtctaggtgggataacttaaaattgaggacagaagagaggagggaggtcagagaataaggaatattctgtggtgaagaggatgcatttatatgtaaggaaaaatggctaggtctctggtttatctttttaattcactagctcacagcttcatggtattcccttcccctgtccctactctaaagaatatataggtatcagtgcttactcctttgtttctaatcagcatcactgaatcttttattatttcagaactgacagctgtccggtgctactggggtaagaaaaagttagtctttaaataactgttttccaattacctttcagaagtttatggtttcaatgatatcttctgatcttagcctcatgcattctcagcacctcccaaaacatttgctaaatacatttctccagtgttttacccctccaattcatcagtgcaagtttttcagtcacttcccaagttcgttcatcaccatgtcactagataaacctactccatatctgtcacctaatcatatatatcacacagatgattatattcatatacatatatatatatttttttttttcttgcagtggatgtcacactgaattcagtcaacctaaatttgaatcttgtcctttcagaagatcagagacaagtgatatctgtgccaatttggccttttcagtgttataattatggtgtcttgggatcccaatatttctcctctgggaaacattactgggaagtggacgtgtccaagaaaactgcctggatcctgggggtatactgtagaacatattcccgccatatgaagtatgttgttagaagatgtgcaaatcgtcaaaatctttacaccaaatacagacctctatttggctactgggttatagggttacagaataaatgtaagtatggtgtctttgaagagtctttgtcctctgatcccgaggttttgactctctccatggctgtgcctccctgccgtgttggggttttcctcgactatgaagcaggcattgtctcatttttcaatgtcacaagccatggctccctcatttacaagttctctaaatgttgcttttctcagcctgtttatccatatttcaatccttggaactgtccagctcccatgactctatgcccaccaagctcttgaattttctcatttcttcacctacaaccctttgtcttgacttatctcctgcaactgactcatctgcaacattcacaccattgcttccttgtggtttcccttctttagaacttttactcatccttgagatgtatggtgtatttggcttgagttatgagagatgcttatttattcatttactctttttcatattttcagagaaagttacctaatccctcctaaagacacagcagtatgggtataacatccttgccttcccatttatccatgtttcactttatcactgatatgaagaggcccaaagcctgttagccaccatccatgctacctaggtagtccataggaaccacccccatgaccaccaccaacatcaactaaaggttcttggagggtatgtcagtgtgttgctcaggataccccaggtacatcaaggaatcaaggagaggaaaatatgagcaatatgtgtattcagagtgaagattttatgtccagagtatttgagctcaaaccttgcctgttgttttctaatcatgatgaatactttctcagtttctttttcctgaaatataaattgggatttaagactgtacctaactattaagatcactgtgtaaaactaagtgtctctaaatgtaatgcatcgatttagtgtctggaacataataaatatttgctctcatgattgctaaaaagtgtgagctgtagtaatgtcctgtgcaatagttttgtggccttcagaggaatagtagttgattttactgaagtctcatttttcaagttcccagactccactgttaagaccactccaattttagttttgttttatagaactttttatactgagagtgggactgttttttttcttttttattgtacatatttaagatatatatactatgatgttttgatacacacttacatggtaaagtgattactacagccaagtaaattatacatccactgtatcatatagttaccgtgtgtcgggggggtggtggttagtgcatttaaaatctttcttagcaaattcccagtagacaatacaatattaactagaatccttgaaatagttgggatttttgtcctgcccaaatctcatgttgaaatgtaatccccagtgttggaggtggggcctggtgggaggtgattggatcatgggggcctcatggagggcctcgcaccatccccatggtaatgaatacattcttgctgtgagttcttgggagatctggttatttaagagtgtggcacttcctcctgtctctgtattgttcccactcttgccagagatgttcctgttcctgctaatgttaggataaaaaagtgattatatttgacaaaaaaaatttaagttagtacaacaataaaaaagtacgataggctgggtgccttggctcatgccggtaatcccagccagcactttgggatcccagccagcactttgggaggccgagaagagaggatcacgtgaggtcaggagttcaagactggcctggccaaaattgcaaaaccctgtctctactaaaaatacaaaaattagctggatgtggtggcgagcccctgtaatcccacctacttgggaggctgaggcatgagaatcgcttgaacctgggaggcggaggttgcagtgagctgagattgcaccactgcactccagcctgggcaacaagagcaaaactctgtctcaaaaaaaaaaaaaaaaaactgtgaaaaaagtggtttgttatatagatcaccaaaaaattatgaaacattgtcatacaattcaatgctaggttttaaatctctgtaaaatgaataggttaaaattaacaatcttacaatcaggaagaagcagaaaattccgtagaaccacaataataaaatgatgtaaacattataaaattatatgtgttcaagtgcatagaatgagagtacttttgaaggtctaatgttttgggtcagttctacaatcaggaagaaaaaaagacaggcctacctttccttcttcagaagagagtggggacagaggagatttgatgagggtcaagtctaggaaaagcttcacttttgctcattgtatgttgattctctggatacattcccacctgttctttgccctgatgatgagacttttacccagatgtgacaactgctctcttcatctcatctagtcttctggaaaaaaaaaaaaaatatatatatatata

SEQ ID NO: 637 - DNA, 11043 bp, Homo sapiens
  source 1..11043: mol_type = genomic DNA
gcaacagagtgcaaccctgtctcaaaaacaaaacaaattagctgggcatggtggcgggtgcctgtagtcctagctactctgggggctgagacaggagaatggcatgaacccaggaggcagaggttgcagtgagccaagactgtaccaccgcactctagcctgggtgacagagtgagactccgtctcaaaaaaaaaaaaaaaaaagaaaaaaagataaagggtgggagtctctgagcctatgttgacttgggaggctgtccattaggaagaaaagaggggggccggacatggcgactcacgcctgtaatcccagcactttgggaggcccaggcgggtggatcacgaggtcaagagtttgagaccaatctgaccaacatggtgaaaccccatctctactaaaaatacaaaaattacgccgggcgtggtggctcacgcctgtaatcccagcactttgagaggccaaggtgggtggatcacaaggtcaggagatcgagatcatcctggctaacacggtgaaaccctgtctctactaaaaaatacaaaaagttagctgggcgtggtggcaggtgcctgtagtcccagctacttgggaggctgaggcaggagaatggtgtgaacccaggaggcagagcttgcagtgagccgagattgagccactgcactccagcctgggcaacagagtgagactctgtctcaaaaaatatataaataaataaataaataaataaataaataaataaatattagtcgggtgtggtggtgtgcgcttataatcccagctactcgggaggctgaggcaggaagatcgcttgaacccgggaggcggagcttgcagtgagctgagatcacgctattgtactccagcctgggcgacagagcaagactctgtctcaaaaaaaaaaaagaaagaaagaaaaaggggttattattaataatatagaacacgctcgcagaatatagaaagaaccaccacccaataggaagatgaatttcacataataaatgaccccaaacacctcccacctcagaagcagaaaggggccaactcttcctctctctgcccctttcagagcgcggctcagcccgttgggtgcttctgctgcagccttggattaggagggactatgaggtggggacagcaatgacagccatctggccaggccaatacatcctgcctggctgggctttcagctcccaccattgcccctagctggtcagcaaggtcctgcccgcctcctggctgtggggctgcacatgtcagattcccttcccatgtctggggagctcccacctgaggatcttgctggaaagtccttgcctgggctgtgccaatccaaggccctgccctgctcttgaacaaacagccacaggctaggagcagggccacaagatggaggctgcaatgacggcagtgatcggggtggggtcgtcgtgggaggttttttttttttacaaatataaaaacattatatatattgggggtatgtatattacacgtattatccttttaaaaagttttattgtgaaatatttatccatgagtacatataacatagatgtccagtttttcaagttacaaaaagcagacagccctccctttttttttttttttttgagacagagtctcgctctgtcacccaggctgtagtccagtggtgcaatctcagctcactgcaacctcacctcctgggttcaagcgattcttctgcctcagcctccccagtagctgggattacaggcgcacaccaccatgcccggctaatttttgtatttttagtagagacggggttttgccttgttggccaggctggtctcgaactcctgaccttgtgatccgcctgcctcggcctcccaaagtgctgggattacaagcgtgagccactgcgcctggccaaaagcagacacccttggaaccacctcccagaacaagaagtggaacatttcaagtaaaaaaaattacacctgccctatgacccagcaaccccacttccggaaatacaagcaaaatcatgcccaggggtcttcgtggcagcttgctctgcaatggcaaacaccacaccaaaccaggaggagctagcctgtgccgacacctgcacacacggctgccccaaagtcccacacccaggggtgggatgctggagatgaaggtcctgccagtgtcacgtgctgcttagtgacagggttgaggggccttagtcggcttgactcaaggtggcctcactgtggccttttgtataaaaaaatcttcaagtgctcattgttccctgagtgactcacttgaggtaacagcctacatacatgaccataaatgtggccaaacatcccactcagaaatattcatcataagccaggcgtggtggcatacacctgtaatcccagctactcaggaggctgaggtaggagaatcccatgagcccatgaccgcacccctgcacaccagcctgggtgacagatggagatcctgtctcaaaaaaaacacatcaatgtttgtatagctaaaaagaaagaaatttaaatgtccaataatggataaataaacttgatagtcattagaatgactacagcaatcagtgaaaattttcaatcatgtgaaaaatgcttatgttaagtcaggaaacttcagaaaacactgtaatctgagctactctggaggctgaggtgggaggatcctttgagctcaggagctcgaggctgcagtgagccatgattgtgccactgtactccagcctgagtgacagagcaagaccatctcctaaaaacacaaaaatgtttaaatgcagaaaacaaaattgtttgtagaatacaattataaggatgcacaaaataaaaagactacaagacaggacggacgtctctccaaatgttacaaaaaattaaagagagctgcaggcggggaggagggaggaatctgtctccccctgggactactctggctcaccgcccctccctgactgctcctttggcccttatcatctccagaggcaagttcaggtagatctgaattttgtcacacacgctgtcctgtaagcccagaagtcccctgggcactgctctcgcctcccaggcccagacagtacctagaactgggttctctctggggcaagggcatcccatttatccccctcctagactgtgtccccttcaaaaaggctgcaacagtgaactctgcgtttatgctcacctcccccaacctcccatctctttctgagttaacagagaggccaacagctggtcctccagtccccaagctgaagctgggcagctcttgggcacataggcatggtggcagctatgccagggctccatcccatgccttcttcagctgagcacctcttcctggggccccagagggaacacagcccctggctgatggcacagggtcagggtcctaccctcgaggagccagaagacgggggtgaggggctggttgaagagggcatggaaggtgtacaggggctgggtctggggctccaggctgtagaaggtgaggcagcctgaggccaggtccaaatccatgcccaggagccgccctgacacccctgggaggcgctgggcttccccgttgtgccaggcctggaggctgtcctcctggacgcagagcccccaggagcagggtccccggccaatgttgtctgtgtggggccccagcctgcaccgtggcagttgcgggtaggagacgcccagtgtcaccgagtggtctgacgcgcgcacctcccagtagtggtgcccggcctggaagctctgggcacattgcacctgccagagctcaaagctgccgggcccgcctgggccccgggactgacgacagtgcttcacctgctggtcctggcgcgacagatagaagtgacggttggcgctgactggatcaaaggtcagattgcgataatctgttggggaaaggaggacagcagtgggctgggggaagacagcacaaccagatctccatttatccgctgctaaacctccgccaggcacgctgagcaccggccgtcaccatagcacttaatcctcgccacgacctcgcaggcggaatcctctatcagccccgttcacagctgagaaaactggggctctgagagccattaactcagtgttaagtggaagaattacgggtctgtgccccagactctgtccttcaacgcacactggctgcgtctgcttcagggtggatgtgcacgaggtgtgcagcgggtgggaccaggctcagatgtcccggcaggacagtcaaaacaagtgcccccctcactcacacgtgcatacgaacatgcacacacacacgtgctcacagcacacacaggcacttccttgcacacgcacacacaggggcacacatacacgaacggcctccttactctgccagagtttcctcctcagtggacaaactgtgcttgggaccggtgccaggggacctggggcctctagggggcaaagcagtgttaagggaatggttggagaggtcacgatgtgtgggccctgacccgcctccacccccccagcgggaggggcagctggacccaggacagcagggggaggcctggggtcagtcttacccacgggggctaagtccacaggcttggctggtgccccagggtggctcccctcttccaagaggaggccacacagccggcttagcaactgcttcaggtcacccagctgttggtcttcatcccactgcagaggggtcagtggcccaagaggccctgggggctggaggagctgcgattcctgagccccagggagaacaagtaagcctgggcctgaggggcagggaagcaagtccgccacctatgccctgagccctcgcacctgcaggaaggtctgctcatccacctgctccaggagctcccggatcctgcagccatggcgagccacagcctccaaatggacccgcagccgctgctcctcgtctcgagcctgtgccagcgcctgcgtcttggccacctcgatgctcctcagtgctgtcgtgtgctgtatttccagggcctgtagcaggctgctgaacttgccggagacccaggaggccaagatgcaggccgagttctgggcgggaacaggaggggcttcagggtggccagggccctgtgccataccaagggaggctagggccagggctgcctgctgggctgagggtcagggatgtggggaggcagggtcccgggaacctccccaggacccctgtgcccagctccctgctcagccccgctccctgctgcctggtgttccagggaccagctggtggccgccccaggatgcagtgtgaggccatggtgggcgggcaggcacaggcctcgtacctggatctggctgctttgcttgcgcagctctagtagctggccttcggcctgggtggcctgctgctgggtaacctccaggctggctctcagctgggcctgtggtgcgggcccacgggacaagcaacaagagaaggccaggattggctgtgatgtcctttctcagacaaccaaccatgcctgcagacaccaggcagcccctccccacgccaccccaggccagcctccagagcaccggcctcggtctaacccagggagagttggggccgtgccccgggggggtccagacaaagtccttcctaatctgcagcagggtggtgcctgagcagagcggaagccttgggctcaggacccaacttccattcccatttctacctcttgcatgctgagcaagctgaggccaagcacctgtcctctctgggcctaaccccccacccatcaatacaggaaagcgataatgctggctcaggaggcctcgcagggaggaccccaaacactaaagccgttggtccctgtctcactgcagaggggtcagtggcccaggaggccctggggcttgagaagctgactgcagggacctcccaaagcaccaaagctgtctgacaagtgggcagttacttgctggataaactagattcttctggggatccggccagtccctggccctagttttgagactgagaggggaggaagggacccctattcggttgcgctccctgagtcccttgggaatcaaaacaccgtgctctcatgagagcaggacaaaccacgcaggtcccaggggctccattcccagcacctggtcaaaagcttcaccaccttgtttctgctcctcccgcaatgcactgagatggggaccattactatccccacatcacagaggaggaaacgggctcagagaagttgataatttggtcaaagtcctcagatcttcctaagcccagagctcctccgggcccccagcctccagcatttcacacaggaacacaggaggccggagggcaggctctcccagggcacccaaccctcccccagggacaggcacccccatgtccctttccctctctcttgcaaaatcctggctcccctggtgctactggctgcccctgtcgctcccttcctccacatggccctcatctaccggcctccaactcaaacttccgtgcctagctcagtcttctgcacccgcccatgagcagtacatctcgtctcatcctcctcggcggcttcagcagctacaaggaatgtcccgcaacactctggagcccttttccttcacctcatctcagccgctcctgtgaactcaccctggccctgtcaccagctctaaaatctccattctaggcatcgattcttccttctctgaccactgccttcgtgccctctcctgttccagccacctctgtctcagtcctcccacctcaccgacccccagccgtgcactctcccatccctccctgcccatcaggcctcctggccaccccttcccttcctgtcccatccagcgtccctgcgccatcctccatccacgccttagccccaggcctcctctgtccccgaatgattccacatcctgtcttcgctgctgaaatgggttttgtcaagggcacggaccacctccacagtaccgatgctgaaggtcatttctgtcctcgtactgagcctctgatcagcatgggcatcctgcccgttctcttcctggcacccctgtctccaggtgccacacagggctgccattcccccgaccttccccatctccctgggagctccagcttggaaccttctcttcctcctagcgctaatgattcccagctctcgacttccagctccccgctcctgagctttggagctcacagcaagctccgcctcccgggttcacgccattctccagcctcagccaccagaggagctgggactacaggcgcccgccaccaggcctggctaattttttgtatttttagtagagacagggtttcaccatgttagccaggatggtctcaatctcctgacctcgtgatccaccggcctccgcctcccaaagtgctgggattacaggcgtgagccactgcacccggtggtggccaggctgcggggggtccggccccctcctgctcctggcggcagcacccacttgaggaggtgaccctcactcatggtgcacaagctgcaaacacaacagcccttggtctggcagaagagctccagcagctgcccggggcggggtcagcgcgcggcagggctggggccagggtcccaggtgccacaggcccgtcccctggtttgtcccactggccactgtgacctctatatgtccaaggccaaactctgccctccacctacgcctctcaggacatagcaccccagccacctgcgtgctcaagacagaaacccaggtgtctcccttgccgccctctctgctgtcccccgtgtcccctctggcctgctttcgcctccacaaggtaccacttcccctcagcgtttctcatctcctcctccatcttggtctcccttccctgatccccagctggttctttgcctccctgcactcctacccgattcgggtcttacatcctgcccccttcagcccccagccaggtgatcagtctccatgaagcccaaatctgatcatgtgccaacctgcttccaagcctataatggcccccatgaccctacagtaagagccagactcccccaggaccctgcccgatcctgcccctgctgacccccagggcctggcccacagatctcagtggcacaaatctgccactagggaccccgcgtgcccagttctttcccatcccagagacgggaccaggctgattcctctgcctagaatgctcttccccaggtctttctcctggcttgcgcttcctcaatcctcacatgccagcctgaaggcggcctccccttcctcctcctggcccgtttagcagggtcaccccaacccctctatcacatgccatgtgctttcctcactgcattttgtaataatacattcacgccttactggaacactgacttcttaagtggattctaagtctcttaagggcagggagctcgtctgatccatttaccaacagcccccatagccccctcgccctccacaaccccgcacagcgaatgaaaggaggctctcggagcgcaggagacacacgacggttctctagcgcttgggcacggagcagggagctgctgcctcacgcccaggctttgttcatccagagggcaccgagcagcttctgagacccaccctgtgtcactggccgggctgcatatcccagtctgatgcacagacccacgattttttgtttgtttattttctgagacggagtctcgctctgtcgcccagactggagtgcagtggcacgatctcggcttactgcaagctccacttcccgggttcacgccattctcctgcctcagcctcccgagtagatgggactacaggcgcccgccaccacgcccggctaactttttgtatttttagtagagaccgggtttcaccgtgttagccaggatggtctcgatctcctgacctcgtgatccgcccgcctcggcctcccaaagtgctgggattacagtcgtgagccactgcgcctggcagacccacgacttttataatcagctcccaggttgggagaagccccttacagatgaggctccccgcccccgccgggtgcccgagagagcagggcgcggcccgcaggagtcacccggcggtggccaggctgcggcgggtccggacccctcccgctcccggcggatgcgtcacctcgcgcttgaggcgctcggcatccagcagcgcccgctcgtggaggcgacactcgcgcacggtgcacacgctgcacacacagcggccctcggtccggcagaagagctccagcggccgcccgtggcgggggcagcgcgcggcagggtcggggccggggccgggatcggggccgggatcccgggcgggcccggcgcgcaccacctccagcacgccgctgagggccacgttgcggcgcagctcggcgccgtcgggaaagggctcccggcactcggggcacgcctttccgcagcggtcccaccagtcccggatgcaggccccgcagaagttgtggccgcagggcagcgtcactgggtcctggtagagccccaggcagatggcgcaggtcagcttctcctccagcagctgcgcggccatggcccggcggcggcgagagccaggcgggccccgggcgtcttaaagggaccgcgggcctcgcgcgctgagggcgcctgggcgtggctaacgcggggcggggcgagatccgggcggggcggggcgagatccgcgcccgggaaggcggaggggggcggcaggcccttctctgacaccctcgacgagcgaccgccgcaggggcctaggccacccctgcccacctcggcctggcccgctcgaaggttccgcgttcccgccttgcgcccctccctccgttagggtccacgccaccccggctgagagctgagttcggctctctagggtcccagcctggcgggtccatcccacccccctgggccttcagcccaggtcctggagaccagaggctcgaaaaccccgccaggactccgggcttctgaccacgggccgcgcggaacctcttctggactcatctgccagtcgcctaacagcatagacccccacccccaacaatcccccggggcttggcgatgaaacgggctggcgggctccctgcagacccgagcactgctgcactttttcctggagctgggtttcggacacttgccagactggggtgtctcccttctctgggctacacgtaattttggttcttttaaagtaaacagcgagatggaaatgtctggtcaccaagagacagggaccagttaactggtatttttcaaatggccctgaatgaatacacaaaccagctttcatctgcaatcagcatcccctcttcctgctgccctccgctggggagagttccttgcctggggtccaagctgatctgcagcctcagtatttacaggcactccagcatttcccctgaagctgagcaggcaaggcgggtctggggcctagcgcccacctacctgacagtgtgtatcaggccagggggaaccccaggagagtacggcctttctaaccaagctgggctgatgttgaggcggcacgagctctcactgctgcagcaagcactgcgtcctctgtgcggccatagacgaagtttctttctggacaaagtgcacggatctaccctccacctactagttagccagacttctgcttttggtaagggagaaacaaaacacctaaccatccagccgcaagactccatgggttttctgaccctgagcaggtctcttgagacacgctgttgcctacctaatgtggcttctcctcccaagcatggggtgggggctggagcctgtgcagagggtcagtgctcgggcaggcactctctctccaggggccggtgggacccccctgaggcacagagccagtgctcaataaatgctccttcctgagcccagctgctctgctccactttttcggggagctgggtttcaggaacctgctggattgggatgtctcccttccctgggccacacctgtttttggcccactgcctgcttttgcttcggatcccagggcccctgacaccctcagaagacggaggtgaggacgcacttagtggggtgggaggcagcccgtttcccacccatgaagctccatcggggtcctctggccctggagcaccgacccagg

SEQ ID NO: 638 - DNA, 77261 bp, Homo sapiens
  source 1..77261: mol_type = genomic DNA
tttgcctggagccccctcccctgcctcccctcccccagccccctcccagcactcgggcggaagtgagtttgctcctttggagattaaaaggattccgaattccgatcagtcccaataaccggcgtactgaagagaagaggaggaggaggaggaggcagaggcggcaaagcagagaaagagggggcgcgcgcgcgcgcacgcaacccgaactgggggagttgtgcaaagccccaggaggccggggcacggcgggagcaaagctcggtaggcgcagcgcggccgaggccacccgcgtccggatcggcgactcctttcagaaagaagatgacgcgggcgcgagccggcggcgttggccacgcggctcccgagctcgccgcgcggggctgttgccggttccactgattccagcgcgcccgagaggagcctccatccccgaggctcgggatcggaggggggaccaaggcgagggcgaaatggcccgatgacaaaggaaatgtgatcccccttctctgccaaggtttcagagaggacggacgtgaggaggaggaggggcgcagggcgcgcgcggagctcggatagcattgcacgacggcccgcgcggagcgggtacatctaatatcttcctgccgatgaataattcagggcggcccgcggggacctgcggccccgcgcgctaagccgaaggggaaggagcgtgcgtgaggcgcccaggccaggcgaggcgggggcacgagggctccgggccgcgtggggcgcgcgtgcgtgttaagcgcgggcagccgcggcccggctgggcaggcgcgcggaagactcgaggcgcgtgggacgcgcgtgcgtactgcacgcgtgcggccgcggctgggccaccacgagctgcagctgctgcggggcccaccgccctgcaggggaggccgtgcctggctgtgcgcaagccccaagcgcagcacgccgggccacccaggagcccctggccgccgcgtcatgcggcggggcagccgacgtcgcgcggggagacaccggcttggcgacgcaccgctcccgcctttactagtttggggctccttcccctcccaagaacagactaaatccgtttaaagaaaagcaacgcaccaaatactcgtggaaccaaattctgctctcgccgggactgggactgcacagcgaactctccttttgggaactcctttcgtctatcgcgaagggaagcctcagctgctccagggagtcttccgacctccctgcccccgctcgcccctcgcctgtcggggcttgttccggcgttccctcttcggaaggcacgcggcccccaagttatccggaggaatctgtgtcgccgctggatagtggcatttaatgcctgcagtgtcgggggtggcagcgctcgggccggacgtggcgaggccaagcgggcagcgctgctctggtgccggctcccggattgcaggcctaatcgatgcatttttctgagtgagtcggtgactcccccacccacctcgtccgctctctcctcctcctcctcctcttcctctctggtctcctccctcctccgggctgggttgcaaatggcttcgttccccgagaccgatttccagatctgcttgctgtgcaaggagatgtgcggctcgccggcgccgctctcctccaactcgtccgcgtcgtcgtcctcctcgcagacgtccacgtcgtcggggggcggcggcgggggccctggggcggcggcgcgccgcctacacgtcctgccctgcctgcacgccttctgccgcccctgcctcgaggcgcaccggctgccggcggcgggcggcggcgcggcgggagagccgctcaagctgcgctgccccgtgtgcgaccagaaagtagtgctagccgaggcggcgggtatggacgcgctgccttcgtccgccttcctgcttagcaacctgctcgacgcggtggtggccactgccgacgagccgccgcccaagaacgggcgcgccggcgctccggcgggagcgggcggccacagcaaccaccggcaccacgctcaccacgcgcacccgcgcgcgtccgcctccgcgccgccactcccgcaggcgccgcagccgcccgcgccttcccgctcggcacccggcggccctgccgcttccccgtcggcgctgctgctccgccgtcctcacggctgcagctcgtgcgatgagggcaacgcagcttcttcgcgctgcctcgactgccaggagcacctgtgcgacaactgcgtccgagcgcaccagcgcgtgcgcctcaccaaggaccactacatcgagcgcggcccgccgggtcccggtgccgcagcagcggcgcagcagctcgggctcgggccgccctttcccggcccgcccttctccatcctctcagtgtttcccgagcgcctcggcttctgccagcaccacgacgacgaggtgagtgcgtgggggcgtgtgtttgtgtccatcggataactgcgtgtgtgctcaacagcgtttcccggccggtcccacagcgaggggaggaggccctctccggatttggtttgtatttcctttggctacgtggcagtccttgctaccaaagtagatcatgacctgggaagtatgtggaagtggattctgtgtacgtgtcgcgaggggctccgaaaaatcccatagcgtggggtcctcccttttctgattttaatttctgtgtggcaaaacgcggcaatcgtcttgagttaggcgtgagttgggaggagataggtgtgtgtgtttgtgtagacgtggcctgctcctgctcttgtgggcacaccagaggcctcccaacgtgctgagaaggcgctcctttattttcagatttttgtttggaaaactcatagattgttgcctttaaaatggggcgtgagcccggaagagatggttgtgtgggtgagtgcgtggagtttgtgtgcctccgtagacctggtttccacgtgcgcacttgtgaggggaagactggtttttttgttgttgggacagcatggcagtccttgcctccttatgttgggtaagagtgggagcgtctgtggatctttgagggccaagggcccccagtcttaagcccttctctctctgcggctgcttcctatattgtttaaaatgcgtgttctggcccctgaattctcctagcgtgaaatcgccgttcgtgggcccacggctgcaccccgagatagaagcggaataaagggacgacgttaccttcaccagcctgagtctcttgggccgcgcccgcctgccccgactccaagccctacaggaaccggtttccctggttaggaggtatccacccggctcaaccagggtctcgacttccttggaaaagaccaaggcagccgtacgctgctggaacgccggagtgcaaaggcttttagggctacattgcaaccctcgggctcgatttcgccctttgggctgtcgagtaaacatttgcttttcacacagtgtgacccctttctcctttccactttggtattatgcgagtgtcgtcttctcccccgaacccaatgaaggcaggccaaaagtcttgagaagcgggctcttgccgagggggtcggtaacttaggcgatctacctgtagaccggtaagagagggtgtgggtgaaagtcttgacttagagcgtaagctggagactgcagaggctttaaaagccatagtgggggtcgtggcctgtgtgagctggagagtgggtaccgagcaccgcaaaggtgagcccagcgccgctgccttttccactcctaacctgttatttggggaggagggcggagctattgcctgatggcctttagctggcttctcctgttggaaaaaagttgaaattctaatctacttgttgtaggcatctccttttaaaaggtttcttctaggtaagaagctagggggcagttatcttttttttccgtttttaaactttgaatggactcctagttttaatatactgtgggttcatgttctttcatcacttttagaaaaatgagtgattgaggtaaataccgatccaaatcccaggaacagaaaaatggagccaattcacttgcagtttgggatcaaatgcagggtgagcagaatggggttgaatccaggagtttccccttctgagaggtgcttttagtttaaatgtcagtttatatttccagttaaagatacacctatattttatttgggctgaaacagtagatgctcagtgttggcagacttgtaaaagatttattcacttttaaaattagaaaacccttcaaactgcattggggagtgtgaattgagaagtgaagctctccactcaccctgggaggtactcggaagctcttcaaattcactttttagcatgtgcaatgtcaggttgaagtaactaataatccttaacataaaatttgctcagttttgagcaagattctgcttgctccctttagcttttcattaaaaacatttcggaagttgtttggcctttttattcattcctggatttagaacgctagaaatttgagattaaaggtgacaaaccagtgttctgagtagaagactaaagtgttaggagagacagcactaacaggtagtgaggttcataaacggttccacctacagcttaaataattccttttcttttgatctcgttaacagtttgagaatattgttcctttaaaaagtcatccctctctggctgggaaggagctttaggacatttttggaggatgatagactgacccatatctggactgcgatacactgaatgcctaaatccacatattttaatgtgtatactgtctacctcaatttttaagatgagctccttaactgagttgcttcccttgtccacaggctccgttaaataattcagagtagcaccttttccttatagtgactcaggccacctgaccttgggaaggaggcccaaacaccctaccccagcctgcagggtctctcgcccagggggactttcttccttaagcatccccttgtaaaatgccttcttaggattggcaagtaaggtgtctcgtctgagcaattggctttaaaccgtaatgatgataacctggaaatctttgggttttccaacgaaataatgagacgtacttgctgctactcttttattttggcttatttcaacaacatagttggggcttttcactagttctgtgcctccagagtccgaaaggcctgcaggctccgtggcccagccggcatccgggcggggaatccaaggcgaggaatccgaggtcgccgtccccggaacagctggccgcgggcccgctgcgtgccgcgggtcccgggagaggcgggcgcaggtagagtcgccgcgggcctgcgccgccgcccggccagcccggagcctgcctcggctctggggacgtggcctggccggcggctgctcttctccccgcaggcacccgctggggtattcacggccgctctggtcatggagtagggtcttcgcttgagttttgggggaagagtttcacaactagggagttgtgagcgctgctccagctgctcacaagtgaccctttagtgttgttttgcttttggcacatagaacgtgagccctttgcagccttggaggcgacaccggcagcagaaatgctgggtgtgttgtgtgcctaagctgggcgtcaggattctgtgaatggcgggaagttgagcagggtttgaacccaggaaagcctctgtcactagcggtgaggggcagtgggggtgacattgttgccacctggaaaacattgtagcccgccccacccgaggatggcaatattgttcccagttaggcaggtctgggggtggcgttttctggagtctggttggaaaaaggggtgcaggtgttggtagaatccatgcggtccctgtgttgggctttaaaatgcctcctgaagagaaaagttctagaattccaacttgatttgaccctgaacattgagcactcctgggactgtctcctggcaggaaacttaaagtggcttcagtcacttggaacaaggaggtttgctgcctaaaataatcggttgctgtgtgaatttgttttgtatattttaagtcatattgtaaatgggactgtacctgtattcagcaccagtgtatattattctctgttcccaaagtctaagttttttcaggtctgcatatactcagtgtatgcatgcttattttaaattatattcatgttcttgcataaattataaaatccataccaaaatatttttaaaagcataatacaaattttcccacttacactgcatgtcgaagtaattctctttttaagggtgtgaaatgtaggtatagctaaagaaccactttcctatcttttccgtctttagaggcgatcagatgtaactaagttggtgaaatttatgataaactttgagaatttctacaagaaattggcattttaattggaatccgattgattcatattaatttcaacaaatttttaaaaaaaatttttttaaaggaaggacaaggagagaaagtgaacagaaatgggtattctagtatttctgttacctgctttcaacctgctctacactactgggtgaatatgtcctctgagtgcagacatctcacctactggctggaaaaccaaacctaactgccttgaaaataattacagaggttgctgctttgaatccagttcagcaggtagacattaggaagcctactgaattcagaaaatgcttgataaaaatatatgggagggaaatgttcgttattgatatgttaattgcttagcctttgtgggcttaaggtagttccattaaagtgcataggaatggatttttcaacatggaccctcaggaagtgggccacagctagtttggcaagcctgtgctgatgaggttgccttgaaggcataacctgtcataaactgtgctagtagtatggaggctgttgtggtatcagcactgtctgggaaaccttttgtgattatttgttcagtttccttcctttacaaagataaactatagtggttttagtggtttggggattgcatagatttgatacaagatttttatttccaattctaggaatatacattttggaagacaagatatttggggaaaaaaacgttactttttctagacttccagttcttcatttgacaacggtatttgttctttatcattgacattgttttcaaagtgaaatagttgtacttgaaatggggaaacccaggaggcggaggttgcagtgagccgagggtgcagtgagccgagatcatgccattgcactccagcctgggtgacggagcgagactatctaaaaagatacagggaaatcttcctaaaagtgtttgaagagggtcaggcgtgagccaccgcgcctttgggaggccgaggcgggcggatcacgaggtcaagagatcgagaccatcctggccaacatggtgaaaccctgtctctactaaaaatacaacaaaaattagccaggcgtggtggcgcgtgcctgtagtcccagctacccaggaggctgaggcaggagcattgcttgaactggggaggcggaggccgcagtgatccgagatcgtgccgctgcactccaacctgggcaacagtgagacttgtctcaaaaaaagaaaaaaaaaagtgtttgaagattaggtaaaaattgccatttcccatctagttctccctcccattgtattatagctacttacttaatacttttatttagtccttttgtttttttctgagatggagtttcactcttgttatccaggctggagtgcggtggtgcagtcttggctcactacaacctccacctcacgggttcaagtgattctcctgcctcagcctcccaagtaacggggattacaggcgctcgtcaccttgtccggctaattttttttctttcttttttttttttttaagtagagacggggtttcaccatattggccaggcttgtctctaactcctgacctcaggtgatccacctgcctcggcttcccaaagggctgggattgattacaggcaagagccaccgcgcctggccctagtccttttcttaaggctgagtctcactcatcccaggctggagtgcagttgtacagctccttaaagccttgacttctcaggcttaagagatcctcctgcctgtgtctctcaagtagctgggactacaggctctagccatcacacctggctaatttttgtaatttttgtggagatggcgtttcgccatgttgcccaggctggtctcaaactcccaaggtcaagcgacctgcctacctaggcctcccaaaatgctgggatttcagtcatgagccacctcgctgggctagatagtccttttcttttctttttttcttgagatggagtctcgctgtgtcacccaggctggagttcagtggcgcgatcttggctcactgcaacctccgcctccctggttcaagcaattcttcagcctcagcctcccaagtagctgggactacagtcatgtgccaccatgcctggctaatttttgtatttttagtggagacggtgtttcaccatgttggccaggctggtcttgagctcctgacctcaaggtgatctgcctaactcgacctcccaaagtgctgggattcaggtgtgagccactgtgcctggcccttaggtagtccttttctagaaggatctcaggaggcttaaatgtctagtttcctcaagtactacttaatatggatgcaactttctcctcacatgtaaaattatgagcataattgggctttatgtcttttcactgaaaaaaggaactaataatcgtgcatatatagtaagggagttagctcttgtggaagctgtcaatgaagttaaatggctaaaacgcttttttttaagtggtttgccagggtaaaacgtgtttataaatttttctggttcaagagaaattttcattaaataattctgtagctctaaaatttaaccccctctgagttatttctggtgctaaaagtcacatggtttgccatttctccatccagttctctacacagggcaaggtttattttgtctgtgttcattcttagcaaataaaggaccatttcagtgtcatttttgacaggcaaaagggtgagatgaattctatactatgcaggcagtttcaaaatactgcttccccccttctcccactcccacccataaaactaataaaggttaaaggcctggctcactaaggctgtttttgctatctctgacattttggaagcgagcaagagaaagataatgataaagaattacagttgccttaagggagcaagatgccacccattgaagcctactccgttaccgcttttcttcttgacctttcaagcattgtggcttgcaagagtaagcttgatccatctttcctctaaagctgatgtgacctcctgcttgttcaatactaaattattcccctccttttgaggttttgtctatactcacaaactgagttgactgaaaccagattgactgttttgattgacaagactctgacttgtcaacctaaaaagtgggaggagtagggggcctagtggtgtccctttacatttgaaactgtttgacttaaacgatattccaaagtaaatctttgcctctcccatgccatctcttgccttcctcatgctgtagataaatgcagtttgcttacaactggctttgaaggtggtagaatgaaatgaaatgggggaagatcccactcaactcccatccaggcagggtgcggtggcttacgcctgcaatcccagcactttgggaggctgacgtgggcagatcacataaggcccagagttcgagaccagcctaccaacatggtgaaaccccatctctactcaaaatacaaaaattagccggacgaatcccagctactgaggctgaggcaggagaatcacttgagcgtgggaggcggaggttgcagtgggccaggatcatgctattgcactccagtctgggcgatagaacaagactatgtctcacaaacaaactcccatccaaacctgagttttagagatactcatattagacttaggctaatagttttttttgtcatccttactgtagattttctactaatcctagatggttcctaaccagaactttaattcccatcaggtgagttcttttttttttttttttttttttgagagggagctctgtcacccaggctggagtgtagtggcaccatgttggtcaggctggtctcaaactcctgacctcaaatggtccacccaccttggcctcccaaagtgctgggattacaggtgtgagccaccacacccggtcaggtgagttttgtgttttgtttgtttttttgagacggagtcttgctctgtcctgtccctgaggctggagtgcagtggtgcgaactcagctcactgcaagctctgcctcctgggttcacgccatcctcctgcctcagccttcccagtagctgggactacaggtgcctgccaccatgcccggctaattgtttttgtatttttagtagagacggggtttcactgtgttagccaggatggtcttgatctcctgacctcatgatccacccgcctcggcctcccaaagtgctggtattaacaggcatgagccaccgcgcccgggctatgagtttgtttttagtgaagctataaattatcagttggcacaaaaaattagcagtcagttgtatttcactcaaaaacaattttccacatagaagtagtagtctttagcaataaaaatactgttttcagtaattatgttagcatattgaagttgtgattattgggaatgaggtcctttgtcatgaagggtagggggataattcttttttttttttttgggtggagtctcactctgttgcctaggctggagtgtaatggtgtgatctcggctccttgtaccttctgcctcctgggttcaagcgattctcctgcctcgtctcacgagtagctgggatcacaggcatgcaccaccatgcctgactaattttgtatttttagtagagatggggttttgccatattggccaggctggtctcgaactcctgacctcaggtgatctgccgcctcagcctcccaaagtgctgggattacaggcgtgagccaccgcgccttgcaaggggggataattcttgattgtgatcatttatctataagagcttctgcagaatagcacattttgtcaacattaataggttttaaagcagagcagtgggcacaaaaaagaataaagtgggtgcagatcagttgtgtagactgaggacataccctcctggttctgacaccctgtgaattccaggggcccttgaatggaccttggagcctgagtggtcaatcaggtcaggcgcctctgagaatgagagcctttgtaaacatctgttggctgctgcatcctgtagctgttacttctggaaagtttggccagccattttcttctcgtcttaaccttttgcagttaaaatgtttttcttgaaatgccagtggatttggggaagtcgtttcatactcttttgggactaattgggataattattaaaatgctgttgtataaaaaatctgcacttaagttttgctgctaaatatagattggatgactacttaagcactggtgttttagaaatgagaattgtgaatgagtggcatcagcagccattattaccatgtattggacacttaaaggaattcaggagtttagatcatatatctccacattttggtctgtgccctccgagatcagtgtcaaagggagatatttctattacttaggattatcaatagatttgtactgaaaatgcttccagaaatgttgtagataagcattgagcaggagagtagaaagtttaggtaacagttggaaaaatgtaagactcctgataggcagtcttaatcaagtgtctattatttggctttgcttgagcactctgattctaggttagattctgctttgcctcagtttttgcatctgtaaaatgagggtaactctttgcggtgttgtaaggagtagagctgaaatataaagtctcatagcacagtgccctacaattgaaggcaattgtaaactttttttttttttttttttttttgagatggagtcttgctctgtcacccaggctggagtgcagtggtgcaatcacagcttactgctgtctcaaccttcccggctcaagtgatcctcccacctctgccttctgagaaggtgcatgccacgatgcccggctaattaaaaaaaattctttttgtagagactgggttgcaccatgttgcccaggcttgtgtctgacccttgggctcaagccaccctcctgcctgtcctcccaaagtgctgggattacaggcgtgagccacctcatctggccccaatttacattttatatgacatgtttgaaaaccactaatttttcttataatttttttgtagagacagggttctcactttgttgcccagttcactgatcttgaactcttggcctcaagtgatagcaatcctcctatgtcagtctcctagagtactggggttacaggcatgagccactgtcccccactagaaagcactaattttttttttttttgacacggactttccctctgtcgcccaggctggagtgcagtgatgtgatctcggctcactgcaacctccgcttcccaggttcaagcaattcttctgcctcagcctcctgagtagctgggagtacaggagtgcaccgccatgcctggataattttctttttttcttttttcttttcttttttttttttttttgagatggagttttgctcttgttgcccaggctggagtggaatggcacgatcttggctcactgcaacctccacctctcaggttcaagtgattctcctgcctcagcctcccgagtagctgggattacaggcatgagccaccacacccaactaattttgtattttcagtagagagggggtttctctgtgttggtcaggctggtctcaaactccaacctcaggtgatctgcctgtctcccaaagtgctgggattacaggcgtgagccacgatgccctgctgtcaccactaatctttaaagccaagatattgtgtgggggctggggagaggaagggaaactgtggcatatcaaggaagcagatcaacttgctcaatggaacagtctaatctcagcaactagaatatttagtaagcattaatgtcatggtattgtgtgtgtgtgtgtgtgtgtgtgtttgtgtgtgcgtgtgtgtgcattggaggaggcatctgaagaggaatcaaatcacaagaaaggccttaagtcttcatagaagaagcttctccattacaaatgggaatgctgaggcctggttatgaaatgacttcatcagaaactgtcctgactcctagtctagcactctttccacattgctatttatgtgacagtaacatgtgttattgacaagtgtagctttttgaaattaacccttaaaaatctgcttaatactaaatttactgcctgaatttttttttttttttttttttttcgagatggagtcttgctctgtcgcccaggctggagtacagttggcattatcttggctcactgcaacctctgcctcctgggttccagcattctcctgcctccccgggtatatgggactataggtacatgccaccgtgcccgggtaattttgtatttttagtagagatggggtttcaccatgttagccaggctggtcttgaactcctgacctcaggtgatccgcctgtcttggcctcccaaaatgctgggattacaggtgtgagccaccgtgtccagcctctaaatgtttttgttttttgtattttatcttcctgctttgaccttttctaagtcattaaggagaacgttaaaaagcataaatgggctctggtctcttagccaaaaactgagtataaccatcttgcaaaaaaccgcctgtcattccaaaattcatttaatagtaagtattaccagaacgataatttagcaagggagaaagctttgagttttgttaatctcttgaaatgataactccatctcacagtatcagggtgaggtgcatcctctgggcatattctattccagattgccgggaatggagctcatctcctgctcctgtccccataccctctcaccctggccccaacacctcagagcaatttggcattgatggattggggatttttacactaagtctggcctctgtcgatatcagtggatttaaggaccaattccagcttttgcctgattgtcaacttccaatgagttatgcaagttgggtttgaccctcagaagatgcccaaagtctgccttcattcctttgcagaaacaaaggacacttcttagttttcaagccatagaatgcctccccctgccccaaatgttgagggttttttttatttgttttgatgtttgtttgtttttttgctggaactggagtgcagtggtgcaatctaggctcactgcaacctctacctcctgggttcaagcgattctcgtgcctcagcctccccagtagctgggattacaggcgcccgccaccacgcctagctaattgtgatattttttagcagagactaggtttcaccatgttggccaggctggtctcaggtaatccgcctacctcggcctcccaaagtgttgggattacaggcgtgagccactgtgcctgcctgcaagtgttgagttttgatggatttttccccacgttatatagatgggggtgggggaccgtgggggattttggagatgaaaggggaagagtggcttgaaaaatgctctcagcttcttggtataggtaagaccatgagctacagagtaacaactggatttaagtcctagtgttgccctatgtgaccttggacaagtcacttaactgacttgatttctgaccgttaagatgggagtgatagaggtggctacatcttccagacctatttgtggggagctctttcacatgaaggttctttgaaagagctagaaaaatttatattgtaatgtatgtgcccataactgtaaataatcatgaaaaaatttggcttcaacttttcctgcaagttgcagccaaacagctagtttcttttcatgaaattaaataatgttgcttatcttccttttttttttttttttttttgagacagagtctcgctgggatgcccaggctggagtacaatggcgcgatctcggctctctgcaacctccgactcgggttcaagtggttctcttgcctcagcctccaaagtggctgggactacaggcgcgtgccaccatgcctggctaatttttgtatttttagtagagatggggttttaccatgttggccaggctggtcttgaactcctgacctcaagtgatctgccctccttggcctcccgaagttcttgggattacaggcatgagccattgcacccggctgttatcttccttaaaagatatattttggttgatggccaagcagtatttgatgccatgaaataacttgggcagttcctcattgctgacagaacttgatgtgttaaaatttgccatcaaaatatttgaatgcctgtttctgctcagtgtgaattgtggtctttgctaaagatgtataagagcagtctacatcctgttccttgctttagtcttgtggtttgactgtttgggaatataaaactgaaaaggaaaaggtgaattgtggtggggggggattctctacttccctatatggccactttatatgtggtcttatttaaattactagatgaaatttaaacactaaaggtggccatgcacagtggttcatgcctgtaatcccagcactctgggaagctgagacaggaggatggcttgaaactgggaatttcgagacctgcctgggcaacaaagcaagaccctgtccgtacaaattagccgagcacagtagttgtgcccctgtagtcccagctactggaggagtggagagggcctgaggtgggaggatcacttgagcccaggagatcaaggctgcagtgcgctatgatcatgccattgcacttcagcctgggcaacagagtgagatcctgtctgctaaagttaatggaatccaaataagttcagatggggagatgagtttgaggctgaatgaacagtactcttggggaatagtcaggtgtggtgacacacataggtgttcccagttactcaagaggtagaaggattgcttgagcctgggaggtggaggttgtagtgagctgagatcataccactgcattccagcctgggttccaaagtgaagaccccgtctcaataaaaaatattataataaagattgtaaaattagaccttttacctaattttttctacttctttcaacatctgtaaggaagagataagggtaccctcctcttcctcccttcctagggggtggacgattgataacattgaagaaataattggtgtatcaggggccagagccacattaattaataggtaatataaagaattattgactgggctgggcgcggtggctcacgccttaatcccagcactttggatgccgaggcaggtggatcatctgaggtcaggagttctagaccagcctggccaacacatggtgaaaccccgtctctactaaaaatacaaaaactaaccaggcttagtgttacgaacctgtcatcccagctactcgggaggctgaggcaggagaatcactggaacccgggaggtggaggttgcagcaagctgagattgcaccactgcaccattgcactccagcctcggtgacaagaatgaaactctgtctttaaaaaaaaaaaaaaaaaaaaaaaaaaaagaggcagctgtttttgttcccaaacctgttgattgtaattaacccagctcaagtaaagatgaaataggagtgcagaatatcgtaatttctatgaaaactgactggaatttctatgaaaactgatttgataaagtaagctctggggaaacagcagagaacaaaatagtcccacatccctcaggcccttgtagacttcacattgggataataagatgattccctgcctttgctgtgtccttaatctgcttctgactggagtggaggctgctgctgttgcacagagggagcatctgtggatggctggtttggaacccccggctatctccctggtgtgaagtaagacattcagtgtgtgatggttataatcttaagagtgagagggggaggttgagtacaggctgcaggagtactgagaatgcttttttatttatttatttatttatttatttatttatttatttattttatttttggctcaggctaaagtgcagtgggaagaatgacctgacttttttgtttgagaatcaaatgaaatattttctgcaatatgccctgtttataagtgaagacatttatgtagaaatttaaagtgaaggaattcatatgcagacagtgctgcatgggggctaatgggagcacctgctatgccccacccccatccttgaccattggggaaaaaaatgggtttttgtttgttttttaattcttcattttcctaaaacaacaggtttttacttcctttgtttctgttgttagcttgaaaagagccttcagggatttagaggaatattccaagaggaaaattcgtttttccaatttaatttaatttttaaaaccacataggtgctggaaatacaaagaaaaaccacagctctgttcagctgtggactgacccaaatatttggagctttggggctcagagttacctccatgtgtatggatgaagtaaggtttaagtgtctccacttttaaactgaagtttggtaggtgaaaccgagtgattgtgtttgttacggttataaatggaaaccattttaagaaaggatagcaaatcctgtcatagcaggagatagtgattaagtctagatgatgtttgggacttgacacaacagctacaaatttcatgttaagcctgttgtgcaataaatccagacttgccttgattgagatcctacagctaaagttatctgtcttatctgcagctttattgttggtttatttaagtagattttgtgttaattacatacacaaatgttaacatacacaggcatacaatgaaaggcattaaatataccagggcttcctagatcgggggagttttacttctagtatagccagttttaaagttggaaaacgaacatttcattttcttataaaaggagggatggtgggaggccgaggcgggtggatcacaaggtcaagagatcgagaccatcctgaccaacatggtgaaaccccgtctctactaaaaatacaaaaattagctaggtgcggtggcgggcgcctgtagtcccagctaccccggataccgaggcaggagaatcgcctgaacctgggaggtggaggttgcagtgagccgagatcgcacggctgcactccagcctggtgacagagcgagactccatctcaaaaaaaaaggggatggtgttcacatttggcgttttgagcattcattttgtctagggtctactgcataatctgagcgcataatttgtctgaatttaatgacagttcattctatcagttcctctttgtcctagccccatagaacttaatttttccagatttttttgtttgcctgttgagatgtaaaaccaattgtcttccccatcaaaaaaggtatgtaaaacatcaaatggaataaaatttaaaagtcatgtgcaagatgaaatcatgaagatgagaaggaggtgatgttaagctctggtttgagagaagaggttgagtttcaggctctgctgggttcccgttattggcatgttacggacatctggacaaatcacagtttttgcatgtgtaacatgatggggggagtgggggcagaatgtccaaggtgtaacagttctgtagcttcagcaggttaagaaacattctcattttaatttcttgactttacacctatttgtaaatgttatcactgtgagagggtcctctccccctctaaatggtaaaagcagacaggttggctcactgtgaacagaaaagaggaacccggatcaatgaatgcttaatcaaaagtatgttaacacttgataggagtgaaaaagggagggaaggggttacaattttgttttaaatgtgtttaaaagataacatttaagggttttgggaaaataacgttttgtttagaattcacaacacttgtcattttaggctgtaatttttctgagtatgtttatgcctgtgagtataatatttgatgtttttcatttctccttccttcaccatccttggtcagctcataattgctggatgaatagaaaactgagatttttcttggggatatcttttatcctaggaagtaactttagttaactctaatcctgatttaattataagtaatatataaacctattttgtttggattatctgtaaattttatttttaaaatgtaccccgtcccacttctttccaaagttgtggtgtaccaggttcgtggggctcctttcaagcaaccatttacatacacaagcatatagaggttagtcttaaaaaacatgtgtaggtgctaccctgtactgacttgctggtcattacttgctctaaacttggcctttatggtgtgaaatttattttgcctttttctgcttctgattgcctcttttatttggctgttgccagcaatgctcatccttgtgtccctgtaaccctctcttatagaagggagatcttcccctcccccgacagctcccccagcaaggagatctctagaaccctggagaggcacgtttgagatgttaatagatcccagcactttgctccggagagcttgccttccaccagccgcatttcctccctccccacccctcccttattgccatcaatctaatgaaaaaaatggctggtcctgttgttttactcttcatttgtgcaattgctatgaggtgtgcatgagcttttcatatgtttactggccatttgagttttcctcctgaattccctgctcctgttcctgggctgatatcttgggttaaaaaaattcaatttgtaggcattttggataaatactgattactagttgtgtgttacaaaggatttttctgaggccatagtttgcctccatttagtttaacttggtatacattttaaatttttagtgtgatagatgtttacttcctctacattttgtgtctttaggtcccaccttagaatatagtcttggtatatcatagaaggtggatctaattttatttagaacaaataacgagcctaatgttctgtctgttagtgaatggtttcttgtcctttttttctttgtaccttagctttcagggaagccattctgaaaatagctgttggctgtgggtgaagagtaggtatatgaaggcccttaacttgtgaatgccagctggcttgcaatcagttgagtgttcatgcttcgtggccatatactggtagctattatactggtagctattaaggaaatagtctctgcagacgttcagttattcacagcagacaagtgatgatgcttatattggtctaggtcttgttacaaacgacccattccttcagcatgtacctattcctgggctgggtctttctatacagaattgctatcttataggtgccttttccccccaatttttatcttcattggatttttaaattacaaaagaaataagtagtcactataacacaggcaaacttgaagtagattaagaaaaaaacaacaacttgccagtttcactccccaaatgtaatcattgttaacagcgtggataatgtaattgttcttatttcctaagcgtatgcaatgccatctttatgactgtctgtaatttagtcgtgtaagcattgatataaaggtgttttgaaatatatattgcattttgtactgtctgtaatatgtctgtgccaccaccaccacaatcaagatataggacatttccaccagcccagaaagttcctttactgtgtggccttttagtacaaatctgtggagaatttggcctgcttttctggtcatgggtctcaaaaggatttatgaaaagtatagttttaggggctgtggatatggtcaaatctctaatgatggaaagttgcaatgtcttgatgtcctggcttactactgatctgaggatagttgtaaaacttactaacgtcgccgggcgtggtggctcatgcctgtaatcccagcactttgggaagccaaggtggacgaatcacgaggtcaggagatccagaccatcctggctaacttggtgaaaccccctccctactaaaaatacaaaaaattagccagacgtggtggcacgcacctgtagtgaagctgaggcaggagaatggtgtgaacccgggaggcggaggcttcagtgagccgacattataccactgcactccagcctgggtgacagagcgagactccatctcaaaaaaagaaaaaaaacctcctgaagtctttacctctatggcatttagcttctgagaaggcccagattctatctcttctgtgtttaagacatttgctgtttcagggccacaatgcaaatggccagggcacattgttttcctctgagcagatgcctgctgggaggcaaattcctcaaggattgctcggaaaatgtggatgtgaattttgctcaatcaacacacttttcattgagcatctgccatgtgcctggctatccgggtgtttgaggacacaaagcaataaacagggcttgccttctggagacccttacatcagtataaagggaggtagaattaccggggatttgcggttccatggataatgatgtacatgtagaagtactaaattattttggattaggtactatatgcttattattattattatatttttttgagacggagtttcactatcgttgcccaggctggagtgcagtggtgtgagctccggttcaccgcaacctcctcttcccaggttcaagtgatattcctgcctcagcctccctagtagctgggattagaggcttgtgccaccatgcccagctaattttatatttttagtagagacggggtttctccatgttggtcaggctggtctcgaactcctgactcaagtgatccacccgcctctgcctcccaaagtgcagagattacaggcgtgagccactgcacctggccttttttttttttttttttaatcaagcattttaggggcatgcagtggagaagtgaagtcctaacgcagaatgccagtttctgtgtattctcccagaggcagttgatataggggagctaaagctctttggtccttggaggaaggttgcttgtagaggctagtgaacacttatgagaaagttcatagcttttcaggcctgttggtcaattggatgtgacagattggtggtttccattcctgaagactatccctcttaggaaaaatgtggattttgagctcctttttttttttctttgttgagacgaggtctcgctctgtcacccaagttggagtgcagtgttgcgatctcagctcacagcaacctcctcctcccgggttcaagtgattctcctgcgtcagcctcctgagtagctgagatgacaggtgcatggcaccacgcctggctactttttgtatttttaatagagtcggggtttcaccatgttgtctaggctggtcttgaactcctgacctcagttgatctgtccgccttggcctctgggatttctgagccgccatgcccagccttgagcctccttaatcagaaatctaaacttacaaggacatttcacttcaggggtgtgagtggagggtgtttcttgtcatggaccagctattatacatgccattcagaaccatctttcatggatgataaggtcctgtgtgaaagtgacatgagtttttttttgagacaagagtctcatttggtcaccaaggctggagtgcagtggcatcatctcggctcactgcaacctctgcctcccgggttcaagtgattctcttgcctcagcctcttgagtagctgggattacaggtgcgtgccaccacgccaggctaatttttgtatttttagttagatacagggtttcaccatgttggtcaggctggtctcgaactcctgacctcatgattcacccgccttggcctcccaaagtgctgggattacagcgtgagccacagcccccggaagacgtgatgttaccaaggaggaacgtctgacccgtcaagccccagaacttacagtaggctttaggctgtttcctctgtgcataattgttgagtcttcactgtagtaagtcgaattgattattgagctttttttggggggggggtgggggtggggtcccttatcgcttttatcactcggcactagcagggttcagaattggtttctcatgtctaattcttccctcatacgtggatctgctggcaagtcagaggttgctgggctggaattgggtaagggcattgaaggtggggtgctgcccggggaagagggtagaagagccacttgcagtggtcccagaagaaagacctgagtgcttttgaggagctgggtgtttgaaaaactgggaagcactttgctgaggactctactggcgattagaactgtatctacaaagcaaatgttcaactaatgtttacagagttaattcaaacgctccagtttaaaaacttgccacctctgcccttcagagcaagagagaaccttgctgctttgtaagtctgcctcaaaatgtctttcccaaggcctctgcaagcctcctccaaaacaggagttgttcatctcctgctcatctgaagatgtacccactgtattgtcagtggaagagtgcaccagcacagggagggagaaaagtttgcattcaccaattccttttccccaccccccttcccttccaaaggtcctttttgctggggatctctgattggaatctccctagaatcatctcatgttgatgtaggcactcttttaaataggccaacaaaccccgcattctgtgctttgaaggacagtaaaatgtttgcactggttacagtaaaagccagtacataacatgaatacaaagaccctcgagataaagttaatgattaaattcagaggttttggcctatttcctatagagattgctctctcctgaactttactccattatgtttagagacaaagccccgaaattgccttctgtgtttataaggtccaattgtaatctgtgctggagactttcccttgagttttctccattcctccgacagggcatgcagtgggggtaggcttccttagggccccttgctggggctgctttcttctgtccagttttgtttggataccacccccaacccacatgcttggggcaggaggaattcctccctgggctctttgttcagcaggaatggctgcctcctggaatgttgatcaccttggcccaagtggctaacactggtgaagccttgcgactctgctgctggggagctttcagggctcagctgggggtgcaagggggcatgcttctggccctgagtggtggcctcccttctcagtcaccccgggctggtctaagtgagccagcttttatcttatccacaaactaaagattctatcccttcctcatttaaaaaagcctggctgggcgcagtggctcacgcctgtaatcccagcactttgggaggccgaggtgggtggaccatgaggtcaggagatcgagaccatcctggctaacctggtgaaaccccatctgtactaaaaaacaaaaaattagccgggcgtggtggcggtcgcctgtagtcctagctactcgggaagctgaggcaggagaatggcataaacccgggaggcggagcttgcagtgagctgagatcgcgccactgcactccagcctgggcgacagagcgagactctgtctcaaaaaacaaaacaaaaaacaaacccaaggagccaggcacaggggaaatgtgtgccctgattgtatcgatagtaccctgagtgtgatattatactattgttttgggagatgttaccattaggagaaactgcgtaaagaatactaggtatctttacctagtgaggtggctcacgcctctaatcccagcactttgggaggccaaggtggttggatcacttgagctcaggagaccagcctgggcaacacggcaaaaccctgtctctacaaaaaaaatacaaaagttagctgggcgtggtggcgtgtgcagtgaagcaagattacgccactgtacttcactgcactccagcgtgggccacgagtgaggcccaccgccaacccccaccccccaaaagaaaaagccccagaggcagggattggttaataagtttagtgccgtacattctttggcttaacgtggtggcttctctactgatgaaacgttctaaagtttattgtttcctttttcaagaggtttgtgggacttcacctaacttggacccccaggacttaccaggaagcttcctttttaatttattttaatatttacttctattttaaaaatttctgtagtgacaggagtcttgccatgttgcccaggctagtctgaaacttctgtactcaagtgatccccggcctcccaaaatgcatgtgccacagtgctcagccagggtgcagttcttggaactcacgccatacacctaggaacaactccactcgcttctgagcacctgtctctacctgctttgctctagcaccataaagattgcccctgtaatttcagcagggatttccccacagctcagcagggagagaagggagaagagaaaggaaactctcagtgctggtcctcatatgctgaggaggggaatttgcagattccatcactgtctagatttactgctgggaaaacattgtccgttttgaaaactgttagtttgataatggcataattatttattgttggtcattttgctttgactcccaggaagctcagagccaaaccatggtctcaatccaggaagtcccatcccgcatgctgctctcctttcatgactcaagcttgcctgtgtttgtcttctttgtaagctgcttttcttagatttgggtgagagttcctgaaaaaaatttcagtaaaaattgagtatgatggggttgtaaattgtccaggatagacaggttttgatccaagaaatcagactgctgagttaggtaaaagaattaagccattgtaccagcatagcacttgtcaaatatgcatataatccccatgtatgctctgtcccttcctggatagagtccagacccgtgccaaggggcgggtgcagagtcttgccagcatgtgcctcacagagaagtcggggcagtgaggactacaaagctctcctctgtaaaaatcaaagtgatttgagaaaccccagggttattcatgtccccttatacagacaggccttagccaggtgtaggctcttctgatccccatctccccacccccacccaagaaccctctgttctgcaatttggtacatcttgaaaccccttcttgagaggtgagaggaagtggttaatccccacttccttccctgggagttttatgggcctctgggagcctgccttactctggccttaatggtcataaatgaccctctctcagggcagggccaagcccctatgagtcttaggtgcttaataaatgctttttgatggtgattcccttggtcttctgtaattggagggcgggggtgggactatttataggattatcggggtgttggccacagcccctccagctgggtataggcctggaacattgtgattgggcaagggcttccagggtgctgggactaggtttgactgaattggtcaagtcatgcctttgttgagaaatacaagaggggcagggcctcaccctccaagggagccctctgcttcctgctactttcaccccccaagatctggcctgcatggtagcagggggtgggagaaatgtgaaggtaatggtaattgagggttgatcttgatttgcacctcaggacactccccccaactcaccaggatcccttttctcatcaaccagagttctaaggcatagcagtaactccccagtaagcttatttcttggtttgcccagctcttgggacaggcttacccaggggcctcgaagtaagggatactgggatctgtgaaaatggagtggatggcccagttgtgcttagcacatttaatctttattagtggcaaaagagctctgggaaggaaatctgggcaggcatcacctctcctgctagcaggtccccctccctttccctgccagctaatccccgtgcctcccattctgcagggttttaattaactgtgtttaatcttccccgggaagcaggcttaatgcccgcctgcgtgcttatcccgttacccgctgggttttctgttccagcccagccaaggacaagtaacattctggaggagtcttcgcccaagggccattagctgagggaacctccctgagctcctttcctgtcgtgctgctttctgggaaggtgcagagccggcccagaaagcaaaccagggtgtgggcaagggttaatctgggccctgcccgcccaccctgcctttgtggaggagctccataaatcctgctggatttaatgttatgcaaataactccagataaacgcacttttttctggttagagtctcaagatgttttaatgtgaactatagagaaaataagtgtcctaaaaactatgagagccgaagtattttacggggaaattatctgtagtgactgcccactatgtgcttacccatgctttctcgcgtcgtcgttattttgtgtggttgtgtaaatcagcccttccctggttaacaatgacctgggagttggttagccctggggctccctaccccatggagattctgattctctaaaactggggtggggctcaaatttgcatctttaacaagtacctctggggattctaatgctggtggcccctttgagaaacagatttaaatgttgccctaggaggaagaggggattttaggtcacaacagagttctcagcacactgttttgttttgtgaattggcattttacccaattgtcagtcataacttcacttttattccctttccctgagactgggtctcggcctgtcactcaggctagagtgcagtggcgtgatcacagctcaccggagcctcggcctcccagactcaagcaatccttctgcctcagcctctggcgtagctaggagtacaggcactctccaccatgcctagctaactttaaaaaattttgtagagagcgtctcaccagtgacccaccgagcctggccaatcataacttttctatttcattttaaatgatatctcctgagttgtaaattggtagacctgtattattatcagatgccctggtgggtttaagcagcctgtgataataatgaagctttaacttagctgatgaagtcggttaaccaacttcaagccataacaattcctagaatattgaatcaacctttagccatccccctcctctgagccaccttgaaaagatagccagtggagacattgtatttctaagaagccattccgtacttccaaagttccccaattttaatgacattgggatggaaattcaaattaagacaaggtaatgaagactgagtttttgggctgaatttgagcgaaactccccaaagttgtttcatgtgggactctgccttcaacacaaacaaggacagctagaactaggtgaggctgtgcatctgagggccttgccaggtcttcccttctggtttcacctctagttggcatctctctctaaatggagctgaacaggagccacctggaggctttccaggtacctgtctggattgtataaaaacagctaatgctgtgctgtggaggggagtacagtaattttcagacagagctgaaatgtttgtggctgtgtctcccagaccatgccagggcttccatttcactcccagggttaattgggtgaaaatgtgggagacacatggctcaaacccacagaaagcttgcaaagatgtaggaatccccaggagccagggcaaaaaggatgaaagagaagaaggtgtttagtatattcaggagtccccactgtccctcatctggctgagcagctcctgccaccacaccatgaacagtcttgctgccacctggcttggcagccctccttccctctagcgggtttgcaaggagtcttcagtttgggggttactctgggggttactcacaggtacaaaccctttctttaactcagtggtcactaggtaaatgagatcatatgatattataagccagttgtatgtattgttaatgacagtatgccctgtgagagaacaaagggccttgggatctttcatgaggttactgggtcaaattgccatgcgacctaggccaagtttggatctttttttttttttgaaacagagtctctctgtcacccaggctggagtgcaatggagtgatctcagctcactgcaacctctgcaacctccgcctcccgggttcaagtgattctcctgtctcagcctcccgagtagctgggattacaggcacctgccaccaagcctggctaatttttgtatttttagtagagacagggtttcgccatgttggccaggctggtctcgatctcctgaccttaggtgatccacctggcagtttgcatccttttttaaaaaacggagttggagactatggctcactagcttgtgcatttatttattatgtttttggatgggaaactaacttggtaagccactttttttttttttttttttttgagatggagtctcgctctgtcgcccaggctggagtgcagtggcgcgatcttggctcgctgcaagctccgcctcccgggttcacaggattctcctgcctcagcctcctgagtagctgggactacaggcgcctaccaccatgcctggctaattttttgtatttttagtagagacagggtttcaccgtgttagccaggatggtctcgatctcctgaccttgtgatccacacgcctcagcctcccaaagtgctgggattacaggcgtgagccactatgcctggccaccacttcttatttttaaattggcataataactgtatatgtttagggggtacaatgtgatgtttggtatatacatacattgtggaatgattatattaaggtaattaacttagatacttatgttttttgtaatgataatgtttaaaatatttaaaatctgttctcaatacatcattaacaactgtggtcaccatgctgtgcattagctcttgaaaacttaagtcttcctgtctaactgaaacttttaaccgacatctccccttgcccctcccctgcacccacccctgtccccagccccccgctccaaccccagcctctgatattctactctctacttctactctagttctcttctctctacttctatgagattagcttttttagattccatatataagtgacatcatgtggtgtctgtctttctgtgcctggcttgtttcacttagcataataacctccagtttcatcccagttgttgcaaatgacaggatttccttccttttaaaggctgaatagtattcacccatgcatatatggcacattttgctgtcttgtaaacaatgctgcagtgaatatgagaggacagatagctctttgacatactgatttcagttatttggggtatatatacccagaagtgggattgctggatcatgtggaagttctgtttttgttttgttttgtttgagtttctgtcacccaggctggagtgcagtggcaccatctctgcaacctccgcctcccaggttcaagcgattctcctgccttatgctctggagcagcttggactacaggctctcgccgccaggtccagcaatttttttttttttttttttttttgagactgagttttgctcttgttgcccaggctggagtgcaatggcgcaatctcagcacaccgcaacctccgcgtcccgggtccaagtgattctcctgcctccacctcccgagtagctgggattacaggcacgtgccaccatgtcccgctaattttgtatttttagtagagagaggtttctccacgttggtcaggctggtctcaaactcccgacttcaggtgatccgcctgccttggcctcccaaagtgccgggattacaggtgtgagccaccgcacccagccagggtagtgctgtttttaactttctgaggaacctctgtgcccttggctccataatggctgtactaactttaaggttgtgcattttaaatgagttgatacagggaagcatccaggccagtgcctgacttactgtatccttacatttggcaagtacacattgactatctgtcttgagctcagctttgtgctcagttaaatgcaggcctttccatatgtgacaaatgaatgtgctgacaagcagagattcgcctggagttggcctcctcccacatttgcctctgagtcttggcttagctggctctcaatatggggctggttttttgttttgttttgggagtgtaatgttttatatatttatgggctcaaccaactgtggattgaaaatattagaaataaggcaataaaaatttcaaatgcagtatagttattgacataatatttacattgtactagatattcataaccaatctagaaatgatttaaagtatatgggaggatgttcatgggttgtctgcaaatactacaccatttatataaggaacttgagtatccttggattttggtatccaagggggtcctggacacgcagtcttccacagataacgagagacgactgtactttatacaagcatggcaaagagccacttaatactgtgtgacctcatgtgagttaatctctttgccttagatttttaatttgttaaatagaaatgataggtagatacttatgctatactgtgcgcatgatgaaatgcacagatctgaatatatggtgagttttgacagttgtgcaccccagggtagtgtgcatttctttctgccctcttagttctacaggtcagaggaatcctgccaagggagttttgcaaggtctggcccataaactcttatcttgtctgcagaagtcagctggtcttgtcacttctttccctgataaccacccctcttccctggaggggtgggggcctgaatcatcagggcatgaagccgttgtggaaggttccctccgaagaaataaggggattgtctttgctaattctctgctatctctttatctcatatttcttaatactgttttctttttatggttctttttgggaaacgaggctcaaaaatacccctagttttgtctatgattagggtcctgaggttatttttcccttgagccaggcagttttaaaatgcctgatgcctcttcatttttgccctttaaaacaccagccttggccagctgaatgaaacctggggcagtggccaggctgtggacccagtggagtctggggatggcgggaatcaccttggttagctgagacttgaggtcacaggacaaccagaaagctgagctttcatgtggtagtgtcatggagcagtggaaacttgtggatttcagagccctgccagacacatccctaagcccctaaaccccaatccctcacccctattcaatgagttccctgaagctctgggggtctagggttggagagaggttaagatgatatttaaattttttcaaacactcttattttaggaaatgggaaaacatgggatcctggccctgggcagtcaggggagccttaagctgggggtactaagtggacaggggacttaagggcatgataactgcaagtgaatttaaaaagctgttatgttggaaaataagcccctcagtttggatggataaggtcagaaggaacccagtcttgtggagctactacttggtagttaaacattgtttcatggtgaaggtagagcgagttcatttacctgccttagattagaaacgctggcactgcagtttcccccaggactaatttttaaacagtgtggttagaggaaggatcttgcatagggcctggagtttttttggttttttttttcttttgagacagagccttgctctgttacccaggctggaatgtaatggtgcgatctgagctcactgcaacctcggcctccaggcttcaagcagttctcctgcctcagcttccccagtagctgggattacaggcgtgcaccaccacgtccagctaatttttgtatttttagtagagatggggttttgtcatgttggctgggctggtctcgaactcctggcctcaagtgatccacccgcctcagcctcccaaagtgctgggatttacaggcgtgagcctggcctagggcctggagttctaatccttatttcttaattaaactgtggctgttttaccaggtaaacaagcctccttccccttccactttttttgtccggtggggtaagagttgggtgcattggctatggattcttaacttttttgtcaagaacccctttaagaatctgacctgtgtactttctctccagaaagaactgcacgctcaaaattttgcacactaattgaggggttgccaggccctgagattgtcacaagttgtgcacacaaattgaaggtagctcctatctagctcctaagattgtgtggctcaaagcgttcttggggtatgtcttcagtgtctttcaaagcaagatagtcatctgttaattatgtattgccaaaaatgaaacaaaaccccacgcatctggatggtttcagaatttaggccctgtggcatggaggttcgttgtcttccagtctccctccgttccgtgcctcttttccaaaggcaggtagtgggacagaaaggtgttgaggcatctgagtttaaaatactaatcctgtggcaaatctagggttttctataggaggatgtggtggttagcgggtgaagtttgcattgctaattgggaatacagatttttttttgtgtgcaattctctaaaagcaagcattagggagggtgaaaagctaagaggaaattgtttcccaaaggatttttgcaaaaggcatttcccttccccctcctcttgtgtttgacctatttatgtactttcagagtgttgatgtcatagtatttcaaagggatattgtatgtcttgactggtaactgcttttaaataggcccaaaatactccgtcctccattaatgatcagcatggctccctccaggaatggaaattgtcagattgtcatagaatgttttagtcatcctgatgactagagtcattctctctcctgcttaattctcgaccttcttttgcaaccactggaacataacagcaaataaaaataacctttaaggaagactagcttgtgtagatgaacattctttgaattttaagctgaaatactgagtgcaggatggagagaacgctgctaagcagggtatcttgaccggcttgttagtgagggttttgtaggggggaccattcgctgccctatccgcctgtttctcttgtgggattaatcatttccttttgaccttgtgctctgcccctaacatgttgcattgatcagatcccgaaatctcaagtcattctccacccccaccacccacctcattctaatgagacatcctgaggtgcaggttggggaggggtttaaatagaaaaggtgttctctatcaaaatacacaaaatgaaaaacaaattattatttttcaaaacaagcctctccactttcctgttttgttttcttatggttctgtcaagctttttagaaagctccgctttctcactgtgactatggaaatgttactggttcagcttacacattttaaaaccttgtgtttctcgggctgtggggaaaaaagtttgttctttttgataagccttacgtctcaatttcctcctcactctcactttttagaaaatttcttaagtagatggtgaaatttgaatttcaggctacaattagtaaaagaactgaatacagttggtaatagagtggaatacaatgaacaaatggccaagccaatgaggaggataaggagaatatgcagaattcactgattggtatatttctctccttaactgaatccacccagctaagttctttgaagacttagcgttgtcctcctcacctttaattaatgaaagtgaactggcaaactggaaactttgttttttgtttttgtttttgttttttttgagacagtcttgctctgtcgccaaggctgtagttacagtggtgtgatctcagctcactgctaccgtcgcctcccaggttcaagcgattttcctgcctcagcctcccgagtagctgggattacaagtgcccgccactacgcctggctaattgttgtatttttagtagagatggggcttcaccatgttggccaggctggtctctaactcctaatctcaggtggtctgcctgccttggcctcccaaagtgctgggtttacaggtttgagccaccacgccctgcctgaactggcaactttgaaagggttggggcagttctactgtgtgacattaatcttgggaaacttaattatttcaaacttaaatttcaggtggcaaaacaggtctgaagagtatcaaaattgcaaaagagagaaaggaaagctgatgttatcacttaggcatagcaacagctttcttttgtggggtaggcaggaaaggaattttctgttcacttcccacttgggaacaactattcaggagagagaagtacccaaaaccctctggagcgtgcccgaggggtcctgtgggaacaaaggctctatattggacctgctgccagcttggaccaggctgttttatggtcggtcctcggccttggaccaaactggtcacagattccctggggggtagccttttggattgtggggccatgaatgaaattggggacagggacagtgtcacggcctaaactggagcgccggaggcacatcctggagaaggacattgagggctgtgttcctttctctgaccagagggagggtgggggttgggaggcagataaataggtttctccagcttctccatatgtccactactgggtttatgcctgagggtgttgtgtagaaatttgaagtattgggaagcaaaacagtggttcaaacaaatgcagtgataggagagtggggctctcagatgtgagaacttagaaacggacccaaagcaagacaagagcattttgccagagaggtcttcttgtgctaggctcattttagggagctatgggaatgtgctattaaagtcaggcttgttaaacccagcaggcatttattcttgacctgtaggggatagggagccattgagggttcttgagtttggaagtaatgaaaaaaagaaagcagctgaatttagcagtggttgatggcacacaggtagaattgcctctgcctgaggattacagaactctaactgggtagaggaaggtttatatttgtatactgtcttttaaaaaaaaaaaaaaacaaaaacaaactttatctggtatttagtataagcaataatgaaacatgtagctttgtcttggaaaatattttaggaacacgaagagaatagcaaaaggtatttgcaattaaattctaagtagctacacaaacacaccccagtttggtgtgaataaaaagtatgaaattttgttctgtgacatgcaaacacttgacagggacccccttactatagatttggttaccaaggaatacttgtatccatttttcttctttttcacaaatagtaaatatatgtatacattactgtcttctgtattttttccataataatgtatcttggagattatttctctctctctctctcttttttttttttttttgagacagtctcactctgtcacccaggctgtactgcagtggcaccatctcagctcactgcaacctccgcctcctgggttcaagcgattctcctgcctcagcctcccgagtagctgggattacaggtgcatgccaccacacccagctaatttgtttgtatttttagttgagatggggtttcaccatgttggccaggatggtctcgatctcctgacctcgtgatccgcccacctgagcctcccaaagtgctgggattacaggcatgagccaccacacccggccagaatatctcattctttttaatggttgccctggaatcaatttatttaaccattattaactagtactctattaatggacatttagtttgcttccagtctcatgtggtgctataaatcacctatttttaaggaagtgcttcattcctgcctggatgaacatctaaagattgtcttgtagcttgcaagtgtttttactagagaagggacaccctttttcctgaggagaaatggaagttaaaagtttgtgctgagatagcccgtggtaagtttgtcaagtctggagtttggttttgtcaaaagtttgtgggaggcctggtgcggtggctcacgcctgtgatcccagcactttgggaggccaaggcaggcagatcacttgaggccaggagtttaagagcagtctgaccaacagagtgaaaccctatctcgactaaaaatacaaaaattagccaggcatggcgtgtgcctgtagacccagctactcaggaggctgaggcaggagaatcatttgaactcaagaggcgggggttgcaatgagctgagaccacgccactgcactccagcctgggtgacagagcgagactcccatctcaaaaaaaaaaaaaggaaagaaaagtcttggtgttggcccctttgggcgatcttggctcacagcaacctctgcctcctgggttcaagtaattctcatgcctgagcctcccaagtatctggaatgacaggcatgtgccaccatgcctggctaattttttaaatttttttgtagagactcagaggtctcactatattgaccagggtggtctcaaactccttgactcaagtggtctgctcatctcggcttcccaaagtgctgggattacacacgtaagccactgcgtgcctggcctacattcccattttaatagttttgttctctagcacattcttagagatagttgtttctggagagacacctcattcatggacatatacatgtaaagatgcttctggacattgcttaggctgttcaggctctgagaggttgtgaccagctcatggaaacctgagttttcctctggttctctgtggctacccacttgaccaaggctctggaatgtaatccatgaatgagattttgatggaattagctgtgtgcagaactggaaggaaccttagtttgaatatcgtcttcattccctaggccttactcaaggaggaaacaaggcatcatctggctaaatctttctagccctcagctccaactcctcacaaagttgttttatgttctttaatagatgagaatggtgttttgattatcattttctggccacagtttgatgctgatgggatacagtgctaaccacccacttaaatagagctattgcataagccgttatttccttccttctgtttgttcaaatgggtattgagcatccatgtgccagacacttagatgcttggaatgaagcagtgaacaagacggaaaagtcagttccagccttcgttgtacagtgatctcccttacccacggtcagccacagttggaaaagaggtgagtgcagcacacagtattttgggagagagagataccacattcatataacacagtatgttgttacacaatatattgttataattgttctattttaatattggttgttgttactcttcttactgtgcctaatttataaattacattttatcataagtatatatgtatagtgaaaaacatagtatatatagggtttggtactatccgtgctttcaggcatccactgggggtcttggacgtatcccccaaggataagagggaactactgtacttaaattcaaatgaacgtgactagatacacattttcagggattgaaaagggctttgaggaaagttaagtcgggtaagggggtggaagtgaggggtaccagtgttgtgtttagtagtggggaaagtgtctagggaggtaggtatggggccactgtggggtgggggagggcatggctttcaggcagagggaatagcagggagtccaggatggcccagccaaacgctgtgggcacagtgacccccaggagtgaagtgggggagcctctggagggttttaaagaggggtgtggcgtgatatgtctctgacctgtctctagccctcctcttttgctgctacatggggaacacactagggcaggaaggagacagatcctcagcctgtcggttctctggaaagtatctgggagaagcagtgttccctagagggacatgtcccagaatgaaggttcatcttcagggatggtggttttggggagcacagcaggagggagaccctggctgagagagaggaggaaggatctcagagagaccccagtataagctgacatgtggtttaagtggtgagggaagggatgccctatgtggtacacagggctaatgagctgcttctgtactgtttataaaacaacccacagttcagagggacagcatacaggagagatgccccaagatgggtagctggcctctcctacaggcaccatctgagcagagcctggattggagttcattgttggtgctgacttaggcagagctagaaggtacctagttttctctaatagttttatttatttatttatttatttatttttgcttttttgtttgtttgagacggagtctcgctctgtcactcaggctggagtgcagtggcgcaatctgggctcactgcaagctccgcctcctgggttcacaccgttctcctgcctcagcctccggagtagctgggactacaggtgcccgccaccacgcccggctatttttttgtatttttagtggagacggggtttcaccatgttagccaggatggtctcgatctcctgacctcgtgatccgcctgcctcggcctcccaaagtgctgggattacaggcgtgagccaccgcacctggccctctaatagttttctttacctggaactttcaccgctcccctgcccccccatccctacttgcactttaagacttgacttctcctcctccaggaagttctctgagattacatctcagctggccttattcagttgtcccttcttttagactgataacactttgagggcaaggacatcatagtgccaagcatgaggcaataaggaaatgtactggatgttaaaaataggacctctgttggtggaaggtgaaaggggtgaaaggctgttttgactggacatgaataagagtggagtcactggcctcctgcagaggaatttgggacatgtagggtcagaggtcatcattcagcatgctttctcccaatcttatttatgaaatctctcaacgttcttttcaacgagcaaacaaagtaacctggagaacccggggcaggagtgccttcttggctcattgtcagtcctgccttgcaaacactgtgatttaacttgccttgccacttaccaggctggaacccttacgggctcatgaccacgccttttctttctggaactgccacggacatttttgggtttcatgtactctcaggatgaattctccaccaccaccccgagaggaaatgtagtatccccatttatgggtgaaaacagctcagtgagccagcttatccaaaattgctggagaaggaccactcaacatttgaacccgggttttctgactccacaacacaagttggcccaaagttgtgtcctggcctccttccacgtggctggaacaatcactaacctctggcccctcaaggtcacccaactgccatgtacacacttctcttcaggagctttccctgggtcccctgttccctctgttttacttcgaattcttcctctgcactttggtcaggaatagcatgcttctttgctcaagctgttccttttaactggcagatttgtaaatcttccacctcagtcctcctgggtctgtcccattctccctgagaagctatttctgatttacctgcttagcacaagggcatgctactgcagtgtctcctaggcagtggctgaagttcttcttggagtcattctgtgcaaaatttctagccatttttagcaagcaatttttttctaactggcctcatgtgcaattaattcacccttgaacaatgtggggggttaggggcgctgacgccctgtacagtcaaatttgtgtgtagactccccaaaacctatatagtatgctgttgactagaattcttacagataatataaagtcaattaatacatgtattatgtattatttgtatgttacatgtattatgtgctgctatattcttcaataaagtaagatagaaaaaaatgttactaagaaaataataatggccaggtgcagtggctcatgcctgtaatcccagcacttcaggaggccgacgcaggtggatcacttgaggtcaggagttcaagaccagcctggccaacatggcgaaaccgtgtctgtactaaaaacacaaaaattagccgggtgtggtagtgggtgcctgtgatctcagctactctggaggctgaggcatgagaatcgcttgaacccaggaggcggaggctgcagcaagccgagatcgcaccactgcactctagcctgggtgatagagtgagactcagtctcggggtgaggggcgggacacaaaaagaagaagaaaacgtgtttactatttaagtggaagtagatcattataaaggtcttcatcctccttgtcttttgagtaggctgaggaggaagagagagaggagggtttagtcttgctgtcttaggggtggcagaggtagaagaaaatctatgtataagtggacccttgtgtttcaaacccgtgttgttcaagggtcaactgtattttggttagttcctcatttgtcttactgatcctctctagcaggggtatattttccaaatcaggccatgggtgagagtgaaaggggttctgttaacagttaagcctagacatcgtgagcaaacctgcccagactgacggtcgaacagctctgggaatagaagcttctcaagttgttttttctttcaaggcttttagcacagtcttaaatccgatgtaaatagtttaaaaattagcagtgaacacagcacacttgactatgaggccaggatactgtggcctcatagtctctgagtctgagtacagaccaactttaagagctgtctctaaaacagatggagttggaggcccaggaggaagttctgggagagccgggaggcccagctgaacagcctgagcctccctggccacctcttcttggggaagagttttagatgcagtgggatgagtattgtggaaagactaaggaaagccacgtagggcctcagaacaatttgggggaaggacagagccaaatatttaggtttcttgtgccatgtgtatcaccttttcctgactttaagtgatagacaaagtaagggtgacttgttcagggccagatggagcaagacaggaatttcaggacccaagtaaagactaatttgagggcttagaaaagtctcctgaaaacttcgattatgtaactgaaaccacctgattgtttcaccagctaagagcttgtgaattttctttttcccaccatagcaggtctggcttttcccatctttgtgaagtttacccttgtgtatctgatggggtggatggtgaggctctgcccctcaccacttttatagggcagaagtgtggggtttctcctggcttcgtgacctgctcagtctgggcagtgggtgcctgtttcctgtttcacaagttctgtcgaacagcacgcttgagcatccaacaagcttcatttgttggaatgaggtaggatttctgattaacattcatacctgagacttgaaattatttttcattaccatcatttgcaaaaagaggaaaaacatgatgagtggtaccgcgattttagggttttcttttttcttttggagacagtgtctcgctttattgcctgggtggagtgcagtggcgtgatgtcggctcactgcaacctttgtctcctgggttcaaacgattctcctgcctcagcctcccaagaagctgggattacaggcacacatcaacatgcctggctaattgtgtttttttagtagagatggggtttcaccattggccaggctggttcttgaactcctgacttcaggtgatccgcctgccttggcctgccaaagtgttgagattacaggcgtgagccactgtgcctggccaactttggggttctggagaggggtttgattccagtggttttgcatacagtttccccaaatgttggtctttcttctgattgtatcttattaccatttagttgacatttccctgcccggaatgccgctggcctgggtgcctgggttccctggctttccaggggtcacttcacttggtctttgcttacatcctgctgtaatgactgcttctttgtagtggactgtgcacactggtgggaagagggatggggagcagccaagggactgggactttatttctgtccttagtgaagcccagtaacatggttcctggtttggcagctgaattgatctttttgcggtgggtgggtttatccccatgtgattcctgcatgggctgggcccttcttcctcaggtcataccacctaaggaatccagctttcctgccacccagttctgttccctgttgggccagtttcttctggtttgcctaggccctttggcccaccctttgttgtgctttctctttctccctcccctctcctcctgttctctcctcccctcttctctccccttccctctcctctcctcccctcccctcttccctcccctctcccctcccctctcctccccttccctctctgatggaatttcactcttgtcaaccaggctggagtgcaatggtgcgatctctgctcactgcaacctccacttcccgggttcaagcaattctcctgcctcagcctcccaagtagttgggattacaggcgcccaccaccacgcccagctatattttgtatttttaatagatacagggtttcgctgtggccaggccggtctcgaactcctgacctcaggtgatccacctgcctcggactcccaaagtgctgggattacagacgtgagctactgcacctgacccctcacacctttctttaaaaaggcctttaaatttgaggtattttgccttttatgcctcatttcagttgccctactctcctcattgctctacccaggaccctctagattattgatggttggtaagagaagatcaccattgctctctacagtttggagtttctcttggggaggtgggacgactcttaacctgcccagtaactgcctagatcacagccgtggggcccaccttcctcaggttactcccctgtgtaggggacagataggtagcttccatctcagaagctcctaaagcaggctgcctggcctggcctgggctctgcgtggctggcctgttgcccctttgacatttgtagaggtgtctgcagggtaggtttcccacttttggagtagaggctacaaacactaacttgaaaagggtttttaaaaataaatcgtggggctgggcgcggtggctcatgcctgtaatcccagcactttgggaggccgaggcaggcagatcgcttgagtgcaggagtttgagaccagcctggccaacatgctgaaaccccatctctactgaaaattcaaaaattagccaggtgttgtggcacgtgcctgtagtcccagctactctggaggctgaggcaggagaatcgcttgatcccgggaggcagaggttgcagtgagttgagatcgtgtcattgtactccagccagagcaagactgtctcaataaaataaagtaaataatctttttttttttcttgagatggagtctctgttgcccaggccagagtgcagtggcacgatctcggctcactgcaacctccgcctccaggttcaagcaattctcctgcctcagcctcctgagtagctgggattacaggcatgcttcacaatgttggccaggctggtctcgaactcctggcctcaggtgatccacctaccttggcctcccaaagtgctgggattacaggcatgagccaccgtgcccagccaataaataaataaattgttggccaggcgcggtggctcacgcctgtaatccaaacacctcggcaggccaaggtgggaggaacactccggagttcaagaccagcctgggcaacaaagtgagttcctgtctctacaaaaaaataaaaatcattttctttataagactaagcatccctctttcacctgcttttgcactgaagatgtttgctctgctctcgctcattttgccttttacttacagagaaagatgtcaagaaaggctcttgtaattgctggaatgtcggggggaagatgaggtactgggagagtgtgtctggcttctctctttaatactctccttgacaggtgcagttttggggaatgccatagaagagcccagacttgggacttggagacaaatctccgtaattcacagacatgccccagcacccactcttccacacccccacaccccacctgagcctcggcaatcccagtgcagcacgggtacttcttggcattcagagaattcacagaggccacgtgtgtgctatccactgcttcccaggattggtcacttcccaatttaaaataattactgcctgtgaacaactctgtattaaaacaaaatttctatagtaatatcttaactgcttgatttttgggggaggaggggagcaggtgggaggcattgcctagaaaggtaactggctctaggccttatcaaccaataggacagtgtaaccttgattcactaaccctaatcaagacagaaggcaactaagtaatgcaggggacaaggacacaagatgatggaacttgcagagaggagggaagtgctcggttgtgttaaaggtagaaaatgtgactagtaatatttactaacagtttttattactagtgtattctcatctgagtctgtatttctgcttctcttctcaggacagttttacccaggtgatgagtgccttcccttgctttaaaaaattctgcctttctacaccatctcagccacatgggtgattgaaacctacttggcttctttaggaactgaaagggtttcaggtgtacactgttgcccgctgtttaagaggcgaggactgagttacatggccacctacagagtctgaccattttttaaatgtcagccccaaagtaccactgactcttgtccatagcacaacagattaaaaccttgccttgcttttgcaaccttggaggcagctggaaaacttgtgtgtctacgtccaaatctgtctttcgtgtccagtttaaaaatatataatttacatgggcagtgatctcagtgttggaacaaatctcttttatttgctgctggaagctgcatgggccactcattaatacatcagaggtcagatgcatgccggggcggcagctgggacactaatgatttcatatggctttgtatgaccgctggccgcctgtggtgctgtaaatcgggactcagggttctaattttttcaaaacctccagggaggttgcctcttgcgagatataacttaagataatatttatagtagagggcagaggaaaaataatacctaatgggaacattgtggaaaaaatggtagcaacctattagaagtaaattatgtggggccattggagttaactcatttatgggctccatgagtattttattaggtccttagctatgaagagtgctgcgctgtggccaagctccaagcatcaccccctcaacaacttaggttgtcagtggaaggattctcccctcacttttgggagggaggagtattaattgaaccttttttttttttttttttttttttttggagctggtcttgctgtgtctggcttgagccaggctgactgcggtggtgcatacatggctcacagcagcctcgaactcttgggctcatcaagccatccttctgcctcagctgtgactataggcatgccccaccatgcttggttaatttttaattcttttgtagagacagggtctttgttggccgggctaagtgtacattttgacttttgatgatttatatatacctgtgtaatcaatcctcgcatcaagatatagattttctctaattccagaaggattcccttggggtccctctagttcaccctcgttctcacctgcaactactgttgttttcttccacgttgagttttatcttcatatattaataaatggagttatgcaatatattctcttgattttagctttttcaccagtcttagtgcctttaagcttcttgtatgtaggtatatttatttatttgtttttgtttttgtttttttgagacggagtctcctctgtcacccaggctggagtgcagtggtgagatcttggctcactgcagcctctgcctcccgggttcaagcaattctcctgcctcagcttcttgagtagctggaaccacaggtgcccaccaccaggcctggctaacttttgtatttttagtagagatggggtttcactatgttggccaggctggtctcaaactcctgactaaaaatggtccacccgcctcggcctctcaaaagtgctgggattacaggcatgagccaccacgcctgaacttcttgtgtgtagttactgacaaacatcctgttgtgtgtatgtaccacggtgtatgttgatgtggaagttttgtttttacttttaaacatccaagactgattgattgaggcagggtttctgttgcccaagctggagtgcagtggaatgatcataacttgctgtaactttgatgtaactttgaactccttgggctcaagcaatcctcccacctcagccttctgagtagctatcaagtttttatttgttcaaaactatatttgggaggcagtaatccaaaacacaactctggcattttctaagctgtcactgagtattgtgtagtgtaacttggatctgttagaggacaccccaagcacaggtgtggcactcttaggaagatgcccttttattgcagagccttcaggaaatgtgtgagaaactgaaggtggtgggctggtgggccatgagtttgcctcaagctgtgtggggtgggtgaagataacaaggtgccagcccaaaaagcagattctgatctgggagtcaagtaagtccaaagggcctagggagctggtgcccgctgggttcgccagaggcagagtgtggaggacgtgttgtttattcgagatcccctgctttgaaaggcaggatgcaggatgtcaacagggtcctgacaccccagtgcccccaggggcagagcatgagtgtctgccgtctgccctcagggctcaggctcaggtccggtgtagagtggatagtctgggtaaaggaaatgtcaggcatagctacattccccagtatgcatccctcttcccccacttggcatgtgtgttgtcccccagttggtattttgcaacatcatgattatacttttaaaaattaagtggtgtgtgtgtgtgtgtgtgtgtgtgtgtgtgtgtgtgtgtgtgtgtgttcacaaaggtctggagaagtgctaattttagctcaacatggggggtgcctgtcattttccctgccggaatcccctcctctccttttacctcgacctctgccccttatggttcacctggaggattgctcctgccctgtaaaactcactgtagcagggccaggcgcagtggctcacgcctgtaattccagcactttgggaggccgaggcagtcggatcatgaggtcaggagattgagaccatcctggctaacacgatgaaaccccgtctctactaaaaatacaaaaaattagctgggtgtggtggcacgcgcctgtagtcccagctactcaggaggctgcggcaggagaatcacttgaactcgggggttggaggttgcagttagctgagatcacaccactgcagtccagcgtaggggacagagcaagattccatctcaaaaaaacaaaaaacaagcaaacaaaaacaaaccaaaaaacccactgttgcagcctgcggagggtcagaatcacggaaaactacatacacgagttacaccaccctttctcaggccacactgatggctgtgtgggttgggcggcagcaagagacatattcatgaaactactttgtctgactctgccaaaactggtcgaaggcgtttgctgtgctgcccagggcattgttcttatctgggttttcatcttccttaagagagtcattgctgggggaaaatgattttcttccaggatgaactcattttcacacttttaatagttctgatagttcctgtgagccagaaatgaggctgtttctctttttatcaagtcagcaagtaagcccagccaaattccagcattcaactctgtaaacagaatttagtcactttcactatctggaccttttaatttgccgcccgccggcccccccccccccccgccccaccttttttttttttttttttttttttttttaagacagagtctgacttgttctgtcacccaggctggaggcagtggagattttggctcactgcaacctctgcctcctgggctcaagcgattctcctgcctcagcctcctgagtagttgagattactgatgcccgtcactacgcctggctaatttttgtgtatttagaggagatgggttttgccatgttggccaggctggtctcaaactcctgacctccagtgatctgcctgcctcagcctcccaaagtgctgggattacaggcgtgagccaccatgtacaacatgacttacttttaaaacatgatgcttccaggatttttgttttttttttggagatggattacaggcatgcgcctgtactaggattacaggcgtgaaccactgcaccaggcctttttgtttggttgtttatttgttctgttttgagatggagtcttgctctgtctcctgggctggagtgcagtggcgtgatctcgcctcactgcaatctctgccccctgggttcaatctattctgcctcagcctcccgagtagctaggattacagggcctgcccccacactaatttttgtatttttagtagaggcagggtttcaccatgttggccaggctagtcaacaagtgatctgccctcttcgcactcccaaagttctgggattacaggcgtgagccaccacgcctgatcaatgctttgtgttttgtgtgttattagtaagagctgtgtgttcaggagaaacacctagacatggtggtgtgctactggagtatgttgaggctccgagactttggacagggccgtgtcgatggaaaataattcagggacttgtgaagctggaccacttcaccaagggcctgtgtgattgtggggcctggtcccacaagcaggggagcaggtgatagaaggaacctacgcagtgttttggaagtcttgtagaatggggcattgggggagcaggggcttgcgaggtgtggttggttggctgctgttggagaggagtaatggcaactttttggggagcagcagtcagtggtagtgaagaatttttaaagaaaattagggaagaagggagcatggtgtggtttttggagtcacataaaaacttaaagtgaacaagtgctaacagatgacattttatgtttgtcaaactatacctctccctgggtaccagcagttgcgatgagttcagatgcagagataacggcatccctctctgatttcaagttttcctttcaaattgtcttgtccatggagcccaaacatttaaatttgagatgagtagatgcctctgaccccactgcagattgttcttggacactcccacttttaccacccccctccccctcctcttttttagatcttcacatgttatattgcttgtttagcctgggaatgaatcttgttcagccagacagtattacatgtgtacgtttaatactgtgcatttacataatacatataatgggactgcaaaagaacattagttttgcagtgaaatacataaacatttactaaatgacataggtaaaaatgattgatcattttcacaccagtttcagtttttaaaattattttattgacaaaaatttgtgtgtgtgtgtatgtgtgtatatatacatacatatttttgagacagggtctcgggctctgtggcctaggctggagtgcggcggtgcgatcatggctcactatagccttcatctcctgtgctcaagtgatccttttgtcttggcctcccaaagtgctggtattgtagacctaaaccagcatccccagccagaatcttacatatttattgtgtacaacatgttttgaagtctgtatgcattgtagagtatgtatattgagctaattaacatgcattgcctcacatacttatttttttgtggtgagaacacataaaaatgtactcagtgattgtcaaaaatactataataactatagtaccgtgttgcacatcagttttgctgccaaatagtatatggaacaacttttgttttccagagcatcgtcttggatgttggagttgcagaaaggggattgtgggcctcagggtgtgtgtgttaattgcttgtgtgtggtgtgtgtgttttaattcctaacacccctttttttattgcctgagattccttcaatttctagagataccatgaagcagccccgcttaatcttatttaacagacgctgctgagactgccagaacgcaacacaacaagactttttctttccttggactgctcctcttgtaggccccttttcaatgttggcacccatcaaagccttccacccaagcaggagtagatcttaactccaattccaactgtgaactgtgtccatactgactgcctctcctggcatcccctgctggccttttgtttttggttgtgttgagaacagaaactggtactttgcccttcacatgggtgaaggtcgacctgactaaaaagaattcgggaattcttactatccaagcttgcaagtaggtttcccccaataaccattatatcaagtgatgtaacaattgaatatattaccaaattgaaaactagggattctgtaaagaacaaggatgttaactgtggcactgcttgcgatttttcaaaaatcaggaaacagttttacaattttattagcctatactcattaagttgtggtacattcatatagcaacataccatgcagccattcggaaagccaggcatctctgcacggagtgacccagaacattctccaagttaatatagttaagagaaactttgttttgtcttaaaaaactaagttacgcctagaataaagcttttttttttttcatggttaaagtggagacaattgagtgagacattagggttttttttttttttaaaaaactgtttgcttgtattactttctgcatttgaacaaatacttgttacctagccaaataaaaagtgttttggaaacactccctcctcatactcccaccacagaaaggataatgtgtctgcagcggggctctgttgtcttgaactggtgaggactatgcctgaactgggtccctattcctttcctatatttatccaggccatagttgtggggcagcacgtggccagggctacaggagaggcttctgctgagggtttgggctgcagatttgagcacaagcactcagtctatctcagtcaagtaaagcgttgttttaatattacttaatagacttatttcatggctagattttacctccttgaacttggcttatcatttttaaaacgaatcttgtgttgtcccacgtgagaacctgcagagtagcacacacaggtaaggcttcttctgggcctcatttgcttctggaacctgttgttgcctccactttacttctgtagtgggaaactcagaaaccctcttgggtgggtggagatctagccaggtgtcagcggttcagccttggtttgtgggagcccaagtaaatgtcctcagtcattttaagggataccaaactaatctttaaaaagtttacagcagtttatgtattttagttgagacatttcgatgaacttaaatggcaatctgggccttcctctgtcctttcagcttacattcttcactgataggggtagttgtgttttaaacctgaagctcattctttcagatgtcccttggtgtgtgtgttccttgttgggccacagatagtgtaaaatctagattccagaagcctgggtgcacgtgcatttgcatgtgcacacatgcgtgcacacacgttcattaacaaagcattttatttaaacactggctaaggtacaaacatgcctactttgtatttttatttatttattttcctttaacctccctcccccattcctcccggcctagtctcccgcccgttcctttcctgctgggctcacattcctaggtctttgtctctgcctggtattctagattttggggagaggaaggcaatgggtgggacgttctggaagctgggggcagggaagagggtggtcacttgcagggtcagaggtcaagcctcctccatttagctggggcagccggattgtcgccaggcccgagggggcgtgtctgtgcatctgcccgggaagccccaaacaggccctggaattcctgctgctagacgacctgttcttcccagtcccttcccccctttcccgggagccgctgttcatggctactaccacatttctggctataggaccctccacacagctccagtttatttccttaaaaataattttacacctgtttcagagagaattacatccatgcacatccttacctatcgattgttttaacagctctaaaattgtggtttttcagtttcaaattgtggttagatgagacatggagcttctaaatgaagcatgaaatcctaccaaagttctgctccaacttttagctggaaggtttataaaagtggatttcattttatagtttttggacaatgcattcttttaaaaattcattgtttactaataacgagcacattgaggccattcttttactcactggtagctttttattatcaaccatttgggtgctccctgtccccatctctgttgcaggcggcctggagctgtgaaagcactggctcttctgaaaccacagtgtgttctgggtacttagaactgcatcgatcctgtgtaaaatgataccaagcagggattgcattcagagacccctttcatttgtatatctgggctctcaaggctggtcacaggagggctctggtgtcggctcagggcaccctgcctttcgctgccataccggccactacctgttctgaccaggatttttttctggctactgcatctgcagaatcttttaaaacctaccattcatggggggattgcaaatgtccagcatcatccaggttctgtattttgaggttgatctaaacctaagaaaaatcaccttaattctttatagttacatagttggagtctggaatgggcaccctggctcagcccagaacttactacttgttctgttgttgttgtttgttttgcactcttagcccgtgttgcctaggctaaattcagtgccatggtcacggctcactgcagcctcaacttcttaggctcaaggaatcctcccacctcaggctcctgagtacaagcgtgagccaccacgcccagcaatttttttttttttttttggtagtttgggcccaagtgttcctctagcctcagcttctcaaggagcttggactacaggcatgagctgccacgtccagctactagaacttaattttgaagctctttagtttctgttgtcaagtctctattaggtagactttctggggtggaagggggtcttccggaggtacccagtcaggccccttttgtttcacagatgagactgaagcccagacaggtcaagagaggtgattggacagatggttccatagccaggtagtgccagtactcactagccatggagatgagagcaatctaggtagttacaatttgcaagagccccttagtccgaaggaagcaggagagtgccattcagtccacacagctgtcttgagaagagggaaagaacggatgcgttctcaaggttgcttagctgttagaagcagggaggccacccgaaggtttggtggcatgttttattcacatgtacaagaaactttctgatggaagggttttcacacttcacatcagcataggagtgatcccttcattcccatgacaaatggagagagcaaaggaaaggaacgtcgttcaaactggtagaattgctttagcaccaggtcgtaaaaagggattggccaggaatttttcctgaatttatccagctcagcatcttttgattagtatttatacttgagaattttagatttaaaagattattaggattagataatctctgaaggatagatcagctttaaaagcaactgatttaaaggaggcaagttgctgctacctggtttcagtctgccaccattgctggcaaagcactgcagtgatcaaaattagtaggaaagttacaaaccttaccacatttcccttgtataaagtaggatctgggccgggtgcgttggctcacgcctgtaatcccagcactttgggaggccaaggtgggtggatcacgaggtcagaagatcgagaccatcctggctaacagggtgaaacctcatctctactaaaaatataaaaaaattagttgggcgtggtggcaggcacctttagtcccagctactcccagggaggctaaggcaggagaatggcatgaactcgggaggcagagcttgcagtgagccgagatcgcgtcgccactgcactccagcctgggtgacaagagcaagactctgtctcaaaaacaaacaaataaagtaggatccataaaaacctcctggttatagcagaactgttacttaacaaaagtaaaaacacaatatcctaaatctttcgtttttcctgtttctgaatcgtaaagtttctagagaaccagtttaacccatcctagattacacacttccctattaactcaattagccccgagtggagtaacttctgtgtgcttgagtgaaccatttagggggagcatttttctagtggacacactttatgtgaagattttggttgttaataaaataaagaacttggagaaggaaagaagcagcagtctccctctgtttgcccccagccctctctttttggagctctccgcctaagaaaaccttctgggccacttccaagccttctccccatctctgtctcccacaacactctgccttgcttctcaccagaatgagcttctattcagtctgcgcagaatcgcctggaatctcacatcctggatctccaccatacctagcaaggtgctttgtactggtgatgagagagctggtgtcatacctgtgttggaaccagctctgtagaaggctcatgctggcttccctgctgtgtctttgctaacactgtggccttgagcactccccaactcctgtcctcacctggagatgaagtgtgggtgttgtatttgtatactgcttccctgcctgttgcatgttagctagcttcccctcatgcccaggtgtaccagaggcaaatttaagctctgctcttgaaagcaatccagcaaacatttacagagtggcgctaagtgccctgctctgtggagagatacagtaatgagactggcccagtttctatgccaaggagttttctctcttgagagctccttgtttattagcaggtaaaggttgtgccagcccttctctctcttcctccctccctccctccctccctccctccctcccagcgtgctgggccccagggaagtgtagaacatcacataaagcagttctgtcagcactggctgcctcccaggttcaactccttggaataacttggcatgaagaagaaaggcaaggagctggctgaccttaccactagctttttgccttcgttccagaaacttaagcctgtagcttgcttgagtgcctgggagaaccatgctttgcactttgcattactacctgtggtgtgaggatggttgttactggctcttaaccttgcttcacacatctaggctagagcagcaaaggaaacttttctggtacattcttacatccaggccactaatatcagactaggtaacacagtcttaacaacttttctggataatgaagctaagattcagggcaaactctcatgccaggaggtttgttttgtttggtttctgccttcgaagtgtctctgttacagttctgaatgagactagagtgggatatggcattcagttgtgttcccccctccattcccccttaatttggggcagagagagtgggagaaaaaaggaagcagatatttttagttatgtttgcagttacgccactgctgcctctccctttggggtgtgcttgctcattggggaagctggtcgttcggttgtgagagccagggccctccagttgctgtcttccctcctcctcccgtcctgcatctccatttatgcctgtaccctctcttgtccccaggtgctgcacctgtactgtgacacttgctctgtacccatctgtcgtgagtgcacaatgggccggcatgggggccacagcttcatctacctccaggaggcactgcaggactcacgggcactcaccatccagctgctggcagatgcccagcagggacgacaggcaatccaggtgagccttccctgcccttctgcagttcccacgtgaatcgagcccccctttctgtcgggtggcatggacagacaattgggcagattccagtgtggggggtggaatagtgacccaaatgagctcaggtgacatccctgcagcagcggtccctttaggggttctggcagtctcgtgaagatgtcagggatgtggccaaagttactggtcagatttctaagcacctagcctgggccccaacataccacctgcacgtgtcccacccagccacctcccgaaatcaaagtggacattggcactttccagccaggactgcagaaaggctgggtgcttaatgcttattactactactactactactactactactactactactactactacaacatattttttgagatgagtcttgccctgtcacccaggctggagtgcagttgtgtgatctcggctaaccacaacctccacctcccggattcaagtgattctcctccctcagcctctcaagtagctaggattacaggcgtgcaccactgcacctggctaatttttttttttgagacggagtctcactctgttgcccaggctggagtgcagtggcacgatctcggctcactgcaagctccgcctcccaggttcacgccattctcctgcctcagcctcccgagtagctgggactacaggcgcccaccaccacgcccggctaattttttgtatttttagtagagattgggtttcaccacattggccaggctggttttgaactcctgagctcaggtgatacacctgcctcagcctcccaaagtactgggagctactgagcccagccaatgccttttatttatttgtgtttttgagacaagagtctcactctgtcacccaggctggagtgtagtggtgggatatcagctcagtgcaacctccgcctctcaggttcaagtgattctgctgcctcagcctcccaagtagctggggttacaggcgcccgctgccattcccagctaatttttctatttttagtagagacggggtttcaccttgctggccaggttggtctcgaactcctgacctcaggtgatccacctgcctcggcctcccaaaatgctgggattacaggcgtgagccaccatgcccggcctaatgctttttagacagagacctttgtgatacagatttacttatttatatgtgagaaattagtgagcagaatgttatgtgaggttcggtgtcttcagtcctttcctggatggtgaatcccctgtaattgaaactgttgtttctgttgaattcctatcaacagctagggaggggcatgtgtaactttgataattggcagggttctctcacataggtgatagtgtgcctgaatttctattaaatcttgtctgatccaggtgacaaggttttaggaaatcagaaaattgtgacttttccctgtgttataggatactttgaaagtcaagaaaagttgttcaccctctaggagaagaaaaattgttcaccctctaggagaaattacataggaaccattctagaatatttatataagtgaattgttttaaaagtaagattctggccaggttcagtggctcacgcctgtgtaatcctagcacgttgggaggccgaggtggtggatcacttgagctcaagagtttgagaccagcctgggcaacatggggaaaccctacaaaaagtaccaaaattagccgggtgtggtgtgacactcgcctgtaatcccagctacttgtggggctgaggtggaagggtcacttgagccccaaaggtggaggttgcagtgagccaagattatgccagtgcactccagcctgggcaacagttaagactctgtttcaaaaaaaatccgttttgaaagtgctaaagaattgagatcatgcctcttaacagaagagggaggatttgatttaataagtttctcagccgctatcacattcccatgcatgatactgaaacaatcttttctgatgagtcagattttatgatgttcagatcataaaattggaagtttgagagactttcttgaatgactaatcctgttattgttatgccagtattgctcattgtctttaaaatgccttgagtgtctctgtgttgctcttctcctttgtcagtgtcttcacctgtgcatcattctgttgtatatcagtgcatctgtccctgcggatgaagtggtttgtgtctttcattttatgccacgacagttgggaccttgacaaataaatgccttaccctgctggtgtctcctcgacaccggtgccctcgacactgtggcatcgcctgaggaacttaaccactggtgtcagcagggcacggttgctcaaacctgtaatcccagcactttgggaggccgaggtgggtagatcacctgaggtcaggagttcgagaccagcctggccaacatggtgaaaccccgtctctactaaaaatataaaaattagccaggcatggtggcaggcacctgtaatgccaggtactcaggaggctgagggaggagaattgcttgaatgcaggaggcagaggttgcagtgagccgagatcgtgccactgcactccagcctggacgaccgaatgagactccatctcaaacaaacaaacagacaaacaaaaagagccactggtgtctaggtctgaactcctagattgtgatatgattttattaacctcttactctcttaagagattgaaaacagttggagcattattgagagaatgctggtgctctctgtgcttagtgggaaaagccaccatgggggagaaaaaatgagttgtaacaatttgctggaggcttattaaggagagcaccaacaaatcatgagtggttaacatggtgaaatctcagagaaatggaaattcactggaaattctgtggggagaaaagagtgtggggaaaataaatatagtcagctgtgtaagtggtgagaacctaggcataaatcctagaggtatgattcaaatgttagttgaaagtgtgtgcccaacattaatctgaatactagatcatggggcattttgggtagaggcattttaggtctgttaatctataacgccacagccaggtacactacatagattgtgatttcctagaaagtttttgtttaaccataacttgtgtgtgtttagcatccttaagtcttgctctatcgcccaggctggagtgcaatggtgcaatcttggcttactgcaacctttgcctcccagtttcaagtgattctcctgcctcagcctcccgagtagctggggttacaggagcctgccaccactcccgactaatttttgtctttttagtagagacggggtttcaccatgttggtcaggctggtctcgaactcttgacctcagatgatccacctgcctcggcttttcaaagtgttgggatatcaggtgtgagccaccgcgcctggccatttttttttttaagagacaggatctctctcaaactcctgggcttttaggcaatccatcccctttctttggcctcccacgtagctaggactacaggtatgctccaccacacccagctaatttttgtattttttgtagagatggggctcgctttgttgtctaggctgatctcactcaaactcctggcttcatgcgatctttcaccttggcctcccaaggcgctgagattaaaggcatcagctaccttgcccagcctgacaatttcttaaaatgtgacacaagtcttcatcccttcaaattttctcatgagatggcaacaattcagtcacatcttcaagctccagttctaattctagttctctttgtattttcaccacatctgcagtgacttcctccactacttctttctgctacaagaagttgatcccaaccctaatcagtgaccttgagttcacccattagggttgggatcagcttcttcaaacatcctattaatgttgatattttgacctctacctatgaatcacgaatgctcttttatagtatctccagttttagtatatgtgctgccaaagtgagtaccacacatgttcttaatggcacctggaatggtaaattttttgcaaaaggattacaaatgagtttgtccagatccatcagaggaatcactatctgtagtagctatcgccttacgaagtttatttgttaaataataagacttgaaagttgaaactacttcttgatccacgggctgtagaatggatgttgtgttaccagacatgaaaacaactttcgtgtccttgtgcatctctagcagagtcttctgggtgaccaggtgcattgtcaatcagcagtaatattttgaagggaatctttttttctgagcggtaggtctgaacagtgggtttaaaatattccgcaaaccggcctggcatggtggcgcaagcctgtaatcccagcactttgggagcccgaggcgggtggatcacctgggatgaggagtttgagaccagcctgactaacacagagaaacagaaaccccttctctactaaatacaaaaaattagccggtcatggtggcacatgcctgtaatcccagctacttgggaggctgaagcaggagaattgctggaacccaagaggcggaggttgcagtgagctgagattgcaccattgcactccagcctgggcaacaagagcgaaaccctgtctcaaaaaaataaatgaataaataaataaaaattttaaaaattccgcaaaccatgctacaaacagacatgctgtcatccaggctttgtttttccatttgtagagcacaggcacggtagatttagcataatgcttaaggggcctagggttgtcaggatggacaatgactgttggcttcaacttagtcaccagctacattagtccctaccaagagagtcagcccgtccattgaagctttgaagccaggcattgacttctgtagctatgaaagtcctacatggcatcttcttccaatataagactatgtctttccaatatcaggctgtctccttctaataaaaggatgtcttgaaagtctgttgtttagctgtcttcatcaattaccttagcttgttcttctgggtaacttgctgcagcttctatatcagacttgctgtgtcaccttacacatatatgttttggagataacttgttttcttaaaccgtatcactcatcctgtcttagcttcaaacttctgcagcttcctcatctctcacccttcatagcattgaagagttaggtccctgctcaggcaggattagactttggcttaaggagatgttatggctggtttgatcttttctccagatcattaaactttcttcatatcagcaataagtctgttttgcctcattgctgtttgagtgttcactggagtgaacttctaatttatttcaagaactttactttgcaatcacagctttgactgtttggtgtaagaggcctagctttcagcctgtctgtagctttctacttgctttctttactaagcttaatcattttagatttgtaggaccttttctttcacttgaacacttagaggccattgtagggttactaagtggcctgattaacaccaaagatcacttgtcacagatcagcacaccagataaaataataatgaaaagtttgaaatactgcaaaaattatcaaagtgtgacacagagacagtatgggcttttggaaaaatgacaccagtagatttggttgatgcagtattgccacaaatcttcaatttcttaaaaaaaaaaaaaaaactggctgagtactgtagctcaaaactgtaacatcagcactttgggaggctgaggcgggaggatcacttgagctcaggaattctataccagcctgagcaacatagtgagatcttgtctctacaaaaaatgaagaaggttagccagacctcatgttgcgtgtctgtagtcccagctactcgggaggattgcttgaggcctggaggttgaggttgcagtgagccaagattacaccactgcactccagcctgggcgacagagcaagactctgtctcaaaaaagaaaatgtgggtttttcttttattttcttttttatctatgaagtgcaataaaatgaggtatggctatagtttgtgattatattttttattatttttatttttgagacagtctggctgtgtcgcccaggctggaacgcagtgacagatcttggctcactgcaacctctgcctccctggttcaagtgaggagctgggattaccggcctgtaccaccacgcctggctaatttttgtgtttttagtagagatggggtttcaccatgttgcccaggctggtcttctcaaactcatggtgtcaagtgatctatccgcttccacctcccaaaatgctgggattacaggcttgagccactgcacccagcctcatccatttatttttaagatcagtttgtgtgattgttgtaaccatctaataaatcatttccagatgaggaggatatgtatactgaaagtatatttccccattgaatgtctggtattaaattgcagatgtcagatgttcagttaactgtgaatcagagttcctaacttatgactttaaagagactcacaacttgtcctgagagtcttggttctggaaagagctccagatacaaatccttgagttaattctggattgtcctataaagagaatctaccctggtgagtgtctagagttggccataacaagaacagcatggaagatgtagcacctcatcactgttgtagggcatttagggggcaaccactcatttttattgcttttttgaacattctgttactttcactttgctgcttttcttgaatatatgacattttggtcatgtatgttattagaggattccacaaggtaaactgatttgctggggatagcgataaacaggatcaggaatagttggtttctacataagaaagttttgattcttcaattactatatttcatcacatttaagatgccattaattgtaaggtgtacatttattttacatacaactaacaaaggaagaaacccacggacaatttagagatgaattatagattcagagaaagatgtgatgaaaattttatatatgtatatatatatatttttttgaggtggagtctcactctgttgcccaggctggagttcagtgccacgattttggctcactgcaacttctgcctcccgggttcaagtgattttcctgcctcagcctcctgagtagttgggattacaggtacccgtcaccacacctggctaattttggtatcttcagtagagacggggtttcaccatgttggccaggctagtctcaactcctgacctcaggcagtccacctgcctcagcctcccaagagtgttgggattacaggcatgagccactgcgcctggccaaaaattacattttagagtgcaccacagtagctccgcatacccagtatggtcgcctacaagtgtatgggtgatgattgcattctcttaccttctgaccgttgggctctttaaataccactgttctccacagttggcatcactgatcgatatctatattctttcccttgagagccagatttggcccaagtctccaccatgctgactgactgccactcagtagtcagctggaaagtgcactgatttgccagtccaaatgtagaccctcaacttttaaatgtttaattagatctgttaacatcccaaagatggttaaattttctctcaagcaccatgcttgttgggtgatttctcttttcttactgtgaaatgtatatatctgttttggaagtttacccagcctttctacattgtcatttcccccaacctatctgccctgtatgtccttcagatgccctgctgttagaggttgggaactagttcaataagtcctggtctgcacatcttggaatgccatgcttggctgggtcgtgcgtaatttggaagggaaagacctatttttccactatgcattgggtagggcttttgtgactctcagcccaaggaatatctttgcatgcttgctgattattaaaattgcaacaaaagctttgaatccccctttgaacctgtttgaaaaatggaagaagcaatttttgtcataaaatgtgagttccagacatgagggataagcgataagcctggctaggagactaggggaagaggtgagtagggtagtacacccattcctatgcaaagggagtggtgtttttgtttttttattttttgagacagagttttgctcttgtagcccaggctgggtctttttttttcttctaacatatgatagaagttagatgtaaaaaaatcaatttggcaagtagtatgacattaatattaatagaaagcagtttgccacctctgctttctattgaggaaggattaagaaatgttacagacataggtttggttgccttggtgaaatattagcttggacaccagttgtgctaattaataaccaacacatctaaaaatatagagggtgccggttactaagttctactctttgggctctaaccctgtcacactcttgccatgtgacactggggctgtgactcttcaaactacatgtatgggaaaaggacttcttccctttttcttccaattcatattacttatattattatcatattatatatttgttttgagacagagtcttgctctgtcacccaggctggggggcgcggtggtgcagtcacagcttgctgcagcttcgatctcccaagactcaagcaatccttccagctcagcctcccaagtagatgggactatacacaagcgccaccatgcctggctaatttatttttttgtagagacggggtctcactcttggccaggctgatctcaaactcgtgggcttaagctatcctcctgcctctgcctcccagagtgctgggattacaggtgtgagccaccgtacccggccccaatttttaatagcaattctttttcaccctgacagcagaagttggtttcaatttcagatcttgccactctcagaattagctggatgtaacctcaccatcttattctgggttcttgtaaccacagctttctttcctttgttctctcagacaaagcagaagaagctgcttctgcaggtactctctgcctcagtgtgctctttgccccagcagttctcccatacctgtttaaccatttccctatgctaaattctgtttaaatgtctagggagctctcttgctctctctcgctttctctctttttccctggatgaatcctgacagcgtgagatactaaaaatgtatcaatgctattatgatacctgcttatatgcatgctcatttgcttggccattctgattttttaacttttaggtaatgtggatgtaatatctgtctgcttcactttattggcttctgtattagtttatcgggtctgttgtaacaatttaccataaactggattacttaaaacagcaggccagaaggccaagatcaaggtgtcgggaccatgctccctctgaaggccctcaggaagactcattgctttcctcatcctggcttttggcagttgccagcatccttggcttgtacctgcatcagtttccgtttctgctttggtcttcacgtggctttgttctctgtatctgtgtctgcacatgaccctctgtgaacatcagttttgggatttaagattcaacttaatctactataacctcatcttagctaattatatctacaaagaccctatttccacacaaggtcacatcctggcccacatttagttgagcctgatgtttggagggacaatatttaacccaacacagctacctagtgctttggtaaacatggttatggctagagatgtgcaaatataaaatttatagattgttctgctaattgttctgctaaatcccaggtggcttaagtatcatgggctttgtacttagctcctgctttgatatgtaatggtacttgagacaggattgtaaaggtggagcagaaacattacagaaatgtgctgttcccttccagcttcagaagggaagtggcatcagaactgggtttggaaatttagggtgaagcattccaggctgtggatatcctgtgagccctctggatctacccagttcccctgtgaatcagctcagtggatccttaggtcacacaggatcctcttaggcagagaatgcagtgtggcacctaaccactggagtcacgggtggtgtgcttttttgttttgttttgtttaaataaagaccaggtttcaccatgttggccaggctggtcttaaactcctgagcccaagtgatttgcctgcctcggcctcccaaagtgctgggattacaggcattagcctctgtgcctggcttccatgggtgtttttggggctgcacctttgagcgtgtcttgcatgccatgaatgtgtcagctgtcatccagagcaagtcaaactgttgggcaggaagaatattcataaaaataaggtagatcgtgtattgtatgatgatgccatctatatgaaatacccagaacaggccaggcgcagtggctcatgcctataatgccagcacttttggaggcctaggtgggcagatcacttgagcccaggagttcgagaccagcctaggcaatgtgacaagattcccccatctctatttgaaaaaaaaaaaaaagaaagaaaaagaaatgcccaggacagacagatctgtagagagacagtagattagtgatcgccatggggtagaaggagggaagtggaaatgactccttaatggtaatggcctttgctttttgggtggtgaaaatgttctgtagctagatagtggtggtgattatacaacactgaacatactaagtgtgactaatggtaaattttatgataggagctaagtggcctgacgggacacaatggctgaacttttgtcccaggtgttttatcagctgagaactattaataacagtgttttactctgtgccaggtgctgagctcagctctacccatgcatttccctcacatctacctttaccaaggttggagaggaccaggagcttgtccaaggccttacaactagtaggaggccctaaactaacccaggattggaacctgggttacctgactccagggatgactggcctggtttgccccggactgtcccagttttagcattgaaagtcccacatcccagaaacccctcagtacagagcaaactggatgattggtcactctgattcctaagcccataccaggctccagtttgggcttccctgacaccctcctgattgaatcacctacccgaaacctgttgtaccaagagcaatcactttggaatccctgatttaatagctcggtatctcaaccatgtaatattaatgataacaccatgccttctgtctggattaattaacaataatacgtctgattaaactggctgatttactacggctggtacagggtggcgtgtgtgatgacgtgtagatggtctctgaccacggggcacagctccttaggtagatcgggggatattcccagtgtgcacttggtgttcgttctggctggggtgagctgtgttgccagtgccttgacaaaagcaggatggattagccactaccctgtcgcacaccctcacgtaagggatgttcctggcctgcggggtttcgcctaggcagagggtgaggccaggaagtctggggaagttgcttgtgtggctggagttgtacattttacatctgatcctcattcccagttttcatctgtcacccagctacactggttttgctgtgtcagagtatctcttaatagttctgacattcactgtgtaggtgctatttctcatgcaaagaaatccagctcttgccagcaactcctttagttacatgtcaaacagatgccagtctctccctaagtgcctgttttccttccaagggagtgaatcaagtggtctgggaacccagggtgtcagcttttcaagtctgacagagcagattcaaatgttttgtataaggaatgacagtccttctaatgcctcgaagttgtttctttttggttttccagctgagcatcgagcaggcccagacggtggcggaacaggtggagatgaaggcgaaggttgtgcagtcggaggtcaaagccgtgacggcgaggcataagaaagccctggaggaacgcgagtgtgagctgctgtggaaggtaacagggagagctcccccacccaggctgtgcccactcggcttccatgaacctcagcagcactctacgggactctttacagatccaggagccaagctctaagtttaaaacacttcgtaattttccagaaagcctgttagcagaaagatgcagggggtccctggaacattgtgggtgctgtctgcagtaaaacaacaagaagccttttcagaagtacgtgggtaaccaagactggaagcggtctccagttttatattgcattcactcaaaaggaggctaaagaagggagcatagtcgaaactgttgttaagaaaggcaggctggtaggaaacatccctatttttggtgacctggctggttgcacttcctgacctcttgtggaaaaccagttttcctcttcggagggcagtgagtgtgtgtcctttcttcctgttggagcaggaaagagtgccgagcacactagtgtgctgtttagataaaaatcagctagaaagactacttgccccacccaagccagcattccaactgttccttttctgattttatgtccccactcagaaaggaggagagttaggtctatgaaagggccagtactccatgccaattctttaactataattacattctctgaacacacgaaaaagactagagctgatttataagggtatccttgtggagtgtgcctgtttccatctccaaacaatatgatgatggtggggatggcacctcagtttctgcaagtgaactttgctaactactgggccctacaatgttctgcaaggtgtccctggattttgcattgcattttccatttagttaacttcacaactggatggatgctttctgcctcttctgacctcttaaggaatatggctcaattgctttctgacaagagactttggaggtgttagtccaagatttttaattcagcatattttttgagcacctttgtgggcatgacatcattttcagacactcagatgtccccatgggtctgccagtgttatgccacccacgaatgttaattataactgaggggcccatttcttgcaacctgagagctttgtagtgaactctgccacaaactcgctcttctggatttcctgatgaaaaaggcctttgtgtgtgggggtttctgccgctttcaccttagttaccctccctcctgtgaggctgacccactgtcctctctaaaggcagttctgtttcagaagaaatagcaagtttttactcttgggagaagcctatttgaaagaagagtccatcccttcttcattgtagtaagcagtttctgcttgcccaaaaattcatcctcagagcattccaaaataagcttccttattttggatacttttgctatagaaccttgctccaaatcctgtggggtccctctctctttgactaattactgactttttttttttttttttttttctgttccttcccagcaaatccctcttactttgcctgtctctgtctgggcatctctttgttacaagttttgttttcctgcatctctggttactttaagatatataagtgcaaggattaagataaccctgttgtaaatatccagatgcctctcttcattcttgggccttatgtatttccagtggacttggctacctcatggggttagctgcatatatatagttcatgggtaagaaccaaaggtggaggtttggcctaatgggcaaatattctttaatctgtccccacgtgggcctctccatacacatgtatcctggttcactgaacagatgaaaaagcaggaatgagtcgaaatcatataatcacccctcccaccctaaagggaaagtcaggttgaaatccagctctttcaacagtggacgcttattctgaaatagccttctatggctttcagatctgtagaacaactcaagtcatggtcctctgtgaaaactgtttggataagttcattcgcttcacagggggaaattgcttagaattagagaacttttaaagaatagagaaactaatgtttcattggtaaaacaaaattccatatttctaaatagcatggtttgagaacctcaagcaggaattattttggcaggttagaatccatgtccatatatattatagcattttagatttaaagggctcttttggaaataatacagacatgccaaaagcgtgctatgttaaaatttggggtacagggcttctcaggttcccagttgggtttttaaaaccattcttaaaatacagaagtaaagagaaactggcccaagcacagtgactcacgcctgtaatgccaacactttgggaggctgaggtgggaagattgcttgagtccaggattttgaggccacccgtggcaacattaagaccccatctctaccaaaaaaaaaaaaaaaaaaaaaaaaaaaaaaaaaaaaaaaggtgccctgtggtggtggtctcctttaatacacatttcccaagctaatccttttgcggtttgttgttgttgttgttgttgttttgagacggagtttcgctcttattgcccaggctggactgcagtggcacgatctcggctcactgcaacctccgtctcctgggttcaagcgattctcctgcctcagcctcccaagtagctgggattacagccacctgccaccacgctcggctagttttgtatttttagtacagagaaggtctcactatgttggccagactggttttgaactcctgacctcaggtggtccacccatcttggcctcccaaagcatgagccactgtgctgggccccaaactaattctttaagaatatgaatctgtcatgtcactcccctactgaaagctgtggttgtgaaatgctgagcctgtgcccacagcaggacctttgctgtttcctttgctgagatagctctccctatggccttttgcctagtctcaacctgtaggtctgaacttgtgaaaggcactgtccctcagtgctctttgtctgtatcagggcccctagacactgtctttcacatcctttttctactttttaacacctatcactatctgacatgatccttatttcttcgtttgcttttgaatactgcttttctaaactacaactctgtgtgagcaaggaccatattttatattttctgtgggttactgcagtacctccaatgcctggcaaagtgtaggtgctcagtacactcctttgtcaaatggctgtttttggttttggtggtgggatcttgctatttttttaaggtgggatcttgctgtattacccaggctggagtgcagtggttattcacagacacagtcatggcacactacagactcagcctcctaggctcaagtgattcttccacctcagcttcccgagtagctgggattacaggtgcacagcactgtgcccagctctagatggctgtttttaacttttattttttttaatttatagcttacagaaaagttgcagtaatagtaactccatatattccttctccagatttactgattatgtacgttttgtcccaattattattattattattattattattattattattattattattttgagacggagtctcgccctgttccctaggttggagtgcaatggtgtgatctctactcactgcaacctccgcctctcgggttcaagcgattctccccacatcagcttcccaaatagctgggattacaggcacctgttaccacacttggttaatttttgttatttttagtagagacagggttttgccatgttggccagactggtctcaaactcctgacctcaggtgatctgcctgcttcatcctcccaaagtgctgggattagaggcatgaggcgtgcgtgtatgtgtgtgtgtgtgtatgtatgtatgtatgtatgtgtatatatgtttgtgatctgagagtgagttggcatattggaaacacaatgcctttacccctaatcacattacaattacagaaatcaggaaatttgattttgatacagtactagcatctactcctcagtccataatcaaggttcaacaattgtcccaacagtgcttttcatagctagccactccctccagtccagagtcactaattacatatagttgtcctgtttctagtaactatcctctgtaacccagaacagttcttcaggttttttggtccattttgattttgctgcttttgaagaaagacagatgtcttttgtagaccatcccacaatatgtgtttgtctgatgcttccttgtgattagttgtggcttatgtggtattttctgtgcttggctctaagcctctgtgtctttctccactcttgcttttccctccaggtagaaaagatccgccaggtgaaagccaagtctctgtacctgcaggtggagaagctgcggcaaaacctcaacaagcttgagagcaccatcagtgccgtgcagcaggtcctggaggagggtagagcgctagacatcctactggcccgagaccggatgctggcccaggtgcaggagctgaagaccgtgcggagcctcctgcagccccaggaagacgaccgagtcatgttcacaccccccgatcaggcactgtaccttgccatcaagtcttttggctttgttagcagcggggcctttgccccactcaccaaggccacaggcgatggcctcaagcgtgccctccagggtaaggtggcctccttcacagtcattggttatgaccacgatggtgagccccgcctctcaggaggcgacctgatgtcggctgtggtcctgggccctgatggcaacctgtttggtgcagaggtgagtgatcagcagaatgggacatacgtggtgagttaccgaccccagctggagggtgagcacctggtatctgtgacactgtgcaaccagcacattgagaacagccctttcaaggtggtggtcaagtcaggccgcagctacgtgggcattgggctcccgggcctgagcttcggcagtgagggtgacagcgatggcaagctctgccgcccttggggtgtgagtgtagacaaggagggctacatcattgtcgccgaccgcagcaacaaccgcatccaggtgttcaagccctgcggcgccttccaccacaaattcggcaccctgggctcccggcctgggcagttcgaccgaccagccggcgtggcctgtgacgcctcacgcaggatcgtggtggctgacaaggacaatcatcgcatccagatcttcacgttcgagggccagttcctcctcaagtttggtgagaaaggaaccaagaatgggcagttcaactacccttgggatgtggcggtgaattctgagggcaagatcctggtctcagacacgaggaaccaccggatccagctgtttgggcctgatggtgtcttcctaaacaagtatggcttcgagggggctctctggaagcactttgactccccacggggtgtggccttcaaccatgagggccacttggtggtcactgacttcaacaaccaccggctcctggttattcaccccgactgccagtcggcacgctttctgggctcggagggcacaggcaatgggcagttcctgcgcccacaaggggtagctgtggaccaggaagggcgcatcattgtggcggattccaggaaccatcgggtacagatgtttgaatccaacggcagcttcctgtgcaagtttggtgctcaaggcagcggctttgggcagatggaccgcccttccggcatcgccatcacccccgacggaatgatcgttgtggtggactttggcaacaatcgaatcctcgtcttctaattgcatttcctaggtttctgtgtttggggtgtgtgtgcgtgtctctctctctctctctctctttctctttctctctctttttgaatttcaaagaagaaacagtctcagggaaatttcttttttcttttttttttttaaagagaacaagaaaagtacaacattgcttaagtcctacctcatctttatttttttacagatgaatgtacttatcttttctgcagggattgagcctgtgaagtgataatttctatctacctcataaatctttacatttccttctgcaacaggccctcttcccctcctcagtggagtttgcatttccctcttcccctgcgtggggcatgatatgcacaagcctggcatctgtatggctgggagggcactggatgtgtgtggtggggtgtattctgtagattgagccaaggaaacacaaaaaaaaactactaagtaaaaaaacaaaaaactataaaacatggaaaaaataggatttgaaatgcataattatagaatacctgtgttcttgagaatactgtttatatggggtttagattatgttgtgttgttttgatctttttggaaaatcttctctttttaaatgctgcaacagagaaatttcctctgttctctgtttatacctcagtgtgtttaacatcctcttctgcatcgtttcttgatcttagacgttgtggctgtggcttgctagccaagaaaagcagacccttcatattttagggtatataatctttgtttcttttaagggagggtgtgtgcatgtttgtttcaaagccatcttgcacccaagtagtaaagctgaaaatgacacactgcctcccaaagaacctctccttttcacactttggtttcttaaaaaagtatatagatggtagctcaggatttttgattaaacatattctcaaaagttatgctttcttattttgctgttaggttataaagggttaaatggaaggaaaaaggaaattaacctcgttctcagagagagggttttcaggcatgggctgacgtggacatgaatgtgggtggacatgcgtgtgctgagggagtcagggagcacattaaagaacaaggcacccccaaactataggaactccacagaaagggcagggtctgccctgacccgcgagtgcatgttgttctgtagtgctaggggtttcttttcctaagaagagtaggcaaaggaaagaacttttattttacaagcacaattttttcctgctttgaaagttcagggaaatagaaggtttgaaagtcaaattaataccaacagcccagtcccacaccctctgcttgggtcactttttataggattgtttgcacccaggccatgctttaggacctcatggttaacatgaatccccccgccccctctccccccaaggcctttgaccataaaggatctagaaaccaaattgtcccaacctgaaatgtaggatgtaatgtcttttcttaaacctgtaactcggtaccaaagaatgaaaatttaaggctcccactgcagaactgtggggtagaatctgtgtcactttacaggattggttggttgtaagctggacttgggtacaaaacttgtgcttctgggcattgtctgtctttcaagtgcaaagcagatgtagctgataccctgcttgtcagaacccagtgggttcctgcaatgccccaaatactgaaataagaaccaaattctggaggagccctcctcagggaaaagagggactctcaaacaaacgtcagtgacttacaagggagacctcttgtttaaagacttatggatcaacttctgttcctctgtttaagagaaatttctattgcaaaatgggtatcgttttaaatgagcagaacagattaacaaatggagcaatttgtttctgttatcccaatagaaaaggagatgatggggacagtgtgacaagtcaatcaagttgcttttcccgtacacctcttttggacgtt

SEQ ID NO: 639 - DNA, 368629 bp, Homo sapiens
  source 1..368629: mol_type = genomic DNA
aaagcaaagagatacaagtatgtgtacgaccctttatctacaaatctctgtacagacccattatatacattatgaatatataatatagatgtagaccccaaacatgagtccataacgatgtctccaactctaaccctgtaccacaaggatcactctagcctcttcctggctgtaacctccactccagcagtgaagatttgatggccaccatccaccatttacatttgtctatttccagtatactcgtgtggtggtttcatcacccagttgtttttcatctctcttgcttctgcctgtttcccccggcactggatcctttcactctcctcgtagccggggcataggcgttttgaactagaatattcgtccagcgctggtttgacacggatcttccgcaaaggaacatttcttttggcctccccagaccccgtcatcttccccattcattctggcggagtaaggactgagaaaccgtgaacccgaggttcagcagccgaaagtcccctgggagatggggatacaccgagaggaatcccattttacaggagagctttgtacccttaggagtaccgtggcctccgggactggagcagataacctgttttcgggccctctatgttcactcaacaactattaagaagccccctccccgagccagggccagcgctgagcccactagggaggcacccgccccggcccgcgtcaccccgccttgcgggctagacgacgaaacgcctcggcgctcaggggaccgcgcaccggtgcaggagccagcgccccggttgggggcgcaatgccgggcctgggaaggtccgccccggctggtcagagctttcctgcgccttccaaggcttggagctgccccggggaagcagaccgaaccaaaccgaacgttcctgcagcctccccgccagccctgcgggagcccatccgcccaacgcggccccgcccctcccccaggctccgcccaccgccgagcccaggctcggcccttgacgaagttcgccggaaattaccgaagcccctcttttttttccttcctctccgttccctgttctcccttttcctttcacccgggttccctcggccgtgatttccccctcccccctccttccttccccattgaaatcaagatggaggctcgcggcagccgccggcgcccgtgatcccggaggtctcgccggccacgggcccccgccctcgcgactgcgcgtccgggaggcgcgtgctgctgcccgcgctccggccggcgcccgggaggccgtggctccgcgcctccgcccctcggccagctcgcggctaccgggcggagtcctcgtctatgtgggcgcgctccttgggccgagccgccgccgccgccccccgccgccccggggctctgcgtccgcgcgccgggcgcgggcagctgggtgctcggcgccgccaggcccggcgcggagcgggcggcacgcggcgctaggggcgcggggcccgaggcgggcgcggccgcgggcgccgccgcagccatgagcggcagcagcggcggagccgccgcccccgccgcgtcctccggccccgccgcggcggccagcgcggctggctcgggctgcgggggcggtgccggcgagggggcagaggaggcggccaaggacctggccgacatcgcggccttcttccgatccggtgagtgcaactgcggccggcccgcccagcggcgctgccccaagcgctcggccgacccgccgcggagctgccgagctccggccaccgcgcgctggtgcccgcccgtccgtccgtcggggcccgcaggctctcgcctgggaccactgcttccatgcgccggggctgcccgccccacatccgcgtgtcccgctgcccgcgcagccgggcgcgcggcagcttggcccgaatgccaccacctcgccctccctgcgcccgcccctcgttttagggcagaatcccccggtctgccgctcccggcagccgcggcttcgcgggttggggcgccggctctttgtctctttcgctggaggaccgaggaggcggcggcggagatggcgtgggcggaggctcttaccccggaggccgagcggactgagccggggccggtccgggacgggaaattggtctttgatctgtgcctgtctctggctgatttgtacctggaccctcctcgaccccattagcagccgggtttctttgcttggccctctagcctgtcatctccccggccttggtctacacttctgtgaaacggggcagtcacggcactcactgcccagggagtggggacggtggccgagctgaagctcggaggaccgggaggcgcggtgagccattgtctccggggacgacccgggagggtcagctgggaacgtggccccgggggggcggcgcggggctggggctcgcggggcactgtgtgggtggcgtggaggtggaggcggtgccaggtggccccgagtccaccccggcgcagagggggtggccgcgggagaggcgcgggtggcgaccggtccgcgggaggggcaccgggtttgctgcgcagggggcgtgacagggcgtccccggtaccccagcggcggcgcctcctcccgctccggcccagatcccgcgcgagccgggcccgcgtccccgcgtcccgcgtccccgcgcccagtccggtctgctcgcgcgtcggctgagcagcagcaggaggaggaggaggcggcggcggcggcggcggcctcggggccggcacccagagcgcagtccttagcgggccgggcacggggcagggaggatgcagactccgggttggagagcggaggagggcgggccaggtccgggcctggagaggcgggcgggggtgctggtggcggcctcggggaggacggccgggctggggacaccgacaggccgggggagcggccctgcgctgggggacgcgcgggaggtcggcggttcacgcttttccgtggcctctttgaaaatcacctccccagattcggtgagatcagttccccaatccgggtcacgaggagcaattgcagcgggagggcgatggtgagaggcagaagttagcagtgctggtagatacctggtttagtactgtcttctcttggttgtcttgatctttgctaggcggggttatttttgattcattttagcagattggttgtggctgggagtgacacagccgactgtccagtgttagcttggggttaatctactccccagtgctcactctccttgagaagtgcctgcagaaagcaaaggtttaggaaaacatgagctccttctaaagaaagctacccccccccacctttttttttttggtgcgactggccagatagagcagccccgtcttacctcttaatagcagaactgggacgtattcccttcatgccctgaagctaagtctagctttctctctacctacctgtcacagaataatagattctgtgcagaattcagctcctctctgttagaaaggctcttctgcgttggagatggattttttggtgtttgtgagaccaggcttttttacatctctattatgcatagtacaaaaatcacttctgctgctgctaagagccctccctaaaagacaccgaagatttgctgcctgttggcgtggctctctccaggagttgtcgtctgctcttggctttgcttaggcctgtgctgcccccgccgccagggctcctgttcatgttccgtttgggtcagaaccaggtaatgtctcactggcttgttcctttcttctgccctccaaaatgacaaacttaactttttagttgtttcacttagaatcaggagccagggcagaacttaagtaggtatcagatgcagcatcccattccagcgatagcctggaacgtctttttaaaagtgaaatctcctttgggcagctctgagtccctgacctagatcttggctctagcatctaggccaacgatgtctagcagggggcagagaggggtcattctgttggatgggtgggtgtgggggtggggtttgaacagtcagggctgaccgggcaaggaagctgaggagaatggagcagtcaaatccatcagaaatctggctttcttttctaagactcagaaacatgggaaaataggttctcattgactggggaggacagatcatggtgtgtttttgagcctggtactaaaagtgccaacctgacttagacaaaggctttccattgcttgcctttcctttctcagccctgaaactctgtttgcatggctgcctgattttctttcttttttttaaattcgttcttgttgcccgcattcggctttgtctttgtagccacagattgaaaactaataccagtggttggatgaaagaaagagaagactttaatagaacttttaaacaattaagggaagttcagaaatagagtgaacagtcctgtgatttctccattactggaagtgctcacataaaggtgctgtcacctggcagggtttggagttgggctcaggggacaggactgctgccctggagaggggtccgggagatgaccttggggctgttcccctttccctgtggactctggctttctctgagtcctcagtgcctaatcattgttctccgcttttctttgggtagttcagggctccagagccctggtgcccttctcctctgctgagcgtccacccagggttcacctcacccaaggtctcatttcctttgctgtcattccgttctctgctcaggaccttggcactccctgttcattttgatgatcattttgatcacctatttatagacctggcatgaagcaggcaggccaattagtgttcaagtggattgagttgtaataatgtgagtcaagtcctggtgcttgtgtgttaaagagcagtaagagattttctgcaggtgttagtgaatttcaaacttcacttttctcctttgcacagagctcagcacagtaaaaccaatttcaatgcaagagcaaaaagaaaaaaaaagacaccacaaaaatgagctagccttgttttaattttattttacagatgaggaatcagccttagggaggtttcatgacttgccccccagagtggaacttgggtagagttagagtcagggccctggtccctggtgctctttcctggtcgcttctcatagccaggacgttgcttacattagttctcaaccccactgggaccaatcatttttattgccaatctattttggggctctgttctcgtggcaataaatcattctttcagagctccctatttaaccttgtgagagcgtgtgtgtgtggtggaggtgcttacataaatgcagtatttttaacctgcctggcacgctttaggttggcgttaaatgaatatctggagaataaaggtttgtagttattctgaagcatcacgtcctgtcgtgcttggtttctttcattattaaatcttactcgactcctcctgcagcccctgtctttccagggaacaggtgaagaaaatcaagtctattagggagaagcacacatacttttatatattttgatatgacggtttccttgtggagtattgagagaagcttttcttcatatttataccttgaatgccacttaggtagttggcctggggcgggctgtgctacttctgttggtattgagaagcctggcagctttggtccttgtgagcaccaataatgattgtattacaaagtgggtccttgttaccctcaatatttcaaaaatagaaactgaaggaaatgtaatttgatagtgaatgttggtttctcctttttaggtggcacagtcagttttagaggaaagcaaggagatttctaaaattcctgtaagtgactttcgaggaatcaaagaagtgcagtaaagtcatcactgaaagaagcttttcattgagaccttgtaaaccgacatattgatgtgggatattgtattttttccctttgcaatttaactatttaagattcaaatgaaaatttaaagaagccatttccaccatttaaatgattaaccagatttaaatgaagccggtggtggtgttcaaaatgaagcatgtggtttacatatgtttcctaaatgtaccctaaaaatatgtaatttcagtggccttttttgaccttttaaatgttacgataaagttgagatttgttctgaactgcaggtgaaagatgtgtttgaagctgtcataatctaagtcagctgtattcaatatttactttgtttatttacttgactatcgagaaaataaaattttatctcataaccttggcagaattccagagaaaagtctaattcttaatcaatagccacactttactgcctagtaaactcactgatattgatagggatgagctgtgttttactacaaaaagcagtgataacaccctgcccccattcctcctcaattctataatgaattggcttttatttccttaagtgcattgtcttgacaaaattttaacagcgccactggcaggaaatagtagcgactccctggacagtgaagacttggatttgcgggagaatcccagtgtattctggtggaaagtgcgtgctctgacctcatcctcccatttcttccaagtactcagctgcgtagacttggccaaactgacaagggtgatggtgtggttggcctggtggatggagatgctgtcttttgaatcttctcagcctcattttaattaatgggctgcagggaccaggctgggtccccagctggagcaaggggtaagcgggttcgatgtgcatccacagggttctcttcgtcctattccagttctgctgacgcgctgttcagtgggccactgggagagggaatgaacagggagacttcccagtgacccttgcacttgggaattctggctgctgttactcagcgggagctgttctgggaattcctattgctgtgcctctgaactgaggggaagggagcatagaggagtggtcagaggcttgcggggccctgcatgtgctgctggcttcctgctggacccctggtctcctccccctgtgcccgcagaacaggacttcgctctcactgccaaggtgcccagctccctgctagttcgtaaatctcaaagagagatacctggctagattgtccagtgaggactcccagctttttgatgttactgagccttctgtgcagacagtcttgcttttggggaatcttgctctcatgtttaatggttaacaagtgcataaacactcattttcgcttctcattcactcatggaaacacttaatttgcttactgaatagttgtgttgttaccttaatttcctcttttctgtcccctctccacataaggaagccccttgaaacccaaattactaatcacctgccccccgggaaaggttgtatgtggggaaagagagagcaaaccagagtgaggctacgagcggggggcagagggcattgacctctgagatttctccctgtgccatttgatggcagaggggctgtggaaatgtaaaacctcgttttggtgatgaacatacttgagttttagattactggctcttttcattagccacatgtctactcttgtctgatgggggaggattgtagagtagtctagagctggtgttttggaggcatcttcctatttgggctttgtcatcaatgagtgcattttagcagttacactgacagagaaagctttcatgaaaacttactcaacacaaagactggattctaggtctagggtactttgactttgtggtgtccacgtgagttgatcaggcttgttttctcacagtctgtagccctgctatggacagggatgaattgcaggaggtttttcttggggagggatttcagtgagtggcagcagatttgtcctggccgctctgtggacccctttcctgaaaggagggggagctggtgctgctccattactggcttactgcagggaaggccaaggggccccttgctgtctgtctgttgttgttagcattgaaactgtgtaggtgtgaatagatcacaaactatagtacagccattccattaatgttgagtgagagaagacagtctcaaaatgctgcatgctgtatgagttcctttatatgacactggcaaaaagacagaaccgtagtgacagaaaacagatgggcattgattgccaggagttagggggtgggggagtatggctacaagggggcaggaggcaggtgaaggatggggaactgatttgtattctggttgtggcagttacatgtgttaaaattcacagacctttacacacatgcacacaacacacacacaccgtttaactgtatatgttattttaaaatgtgacattaaaaaaaggccaataataaactgggagaaaaactattacaaatcaaaggattatatatatgtaattagtaaagggctccctcaaatcaattaagacaagacatatctagaaagaaaataggcaaacaattaaaagaagtatgaatggccaaaaaatacatattcagcctcactcataatcgaggaaatgcagatagaaccaatgataccaacaaaagccaaagctcatataagtaattattctctaagtaaacttgaacaaaattgagttaatttggaaagattttatatcgatttgaaagatagtaatacttgtgttcatactttgctatgtaggacctagcttcttataattgcccgggggtgatctagggtaatggtaaagatagatagggggaaataaagattctttcctgggattctgtaatacgtgttaatttggaaatccatctggtgtataagtcaaatctgacttacaataatctttagctatagacagttaccatttttgctgcttcaaaatttcccactcccatgatttgtgctgctgtccagatcgaagatgacaagtggcccatgcaggatgatcttcagcgcctcacagttcctggtgcgaaagaagaagtttagtttcatctggagggcttcgttcctacatgagtaactataggaggtcatttgccctctgttcttaggcattcttgtatataattgacagctacctatttcacggtattgacaattaataaatggatttatgaagtgttagccccacctacttttaagactcataaccataaaactatgcatgaacttgagaaaaacacagttcaaatttacacgtataatcctaaaatatttttaaatggggtttgttggtgcctgttttttcattgtgtgtgtgtgtgtgtttgtgtgtgtgtgtgtgtgtgtgtatgtatgtatgtaggtatatctcttggaaagtcataaaatacccctctttggatttctgtggaataggtggtttcagtgcaagaatgaatgaatatatcggagactaatacttgaaatctattttcaaagaactcgtgtttcctagtatatatgaagtgacatgtataaatgacatgaatgctttcaggcaaaatgtttagattgtgatttgaaaatgatgtgcatatgagaagtcgttaagatgttggccaaaacagtgtgtgtataaattgatctccattgtttattcattttgctttgcttcctcttgcattgacccatccactttttcaagttcacaatgattcttttttgctgctgccattgaaggatgccactgatacctgtgagagggcactctttggcatttgcattctgaaagttttgcattttcttatttgtgtttactttttaagttcatccttgttctgcatgacagatatgccagggcctgcaggaatagcattaaaattctgttgttttttagataactttattagtttaagttttaaatgataaggaccgagagctacaattcctctgttttttattctgaagctgaaccacacaaatattgaaaaacaatgctttgactggagtgttatatatatttccacctaactagcttcacacaataaaatctctaaagtttaaattgcccaatattttgacatctaaataactggaataaatccctcattagtctaatagtaaacaaatagatttctcatttgtaggtggctttttaaaaaatttaagttcatgattatgagaaattcttcccagcgttcactgcccttttcagtaccagagtgatgaaagctggcatgcaagggaacattactagctcgaaaagcaaaacaaaacaaaacaaacccagatcgcatgggggcaggatgtatttcagtttttttgtttgtttgtttgtttgtttgttttgagatggagtctcgctctgtcacccaggctggagtgcaatggcgcaatcttggctcactgcaacctctgcctcccgggttcaagcagttctctgccttagcctcccaagtagctgggattacaggcgcccgccaccatgcccagctaatttttttgtatttctagtagagacggggtttcaccatcttggccaggctggtcttgaactcctgacctcgtgatccacccatcttgggctcccaaagtgctgggattacaggcgtgagccactgcgtccgtatttcacgctttttaagagtcacttcacctccatctaaattttgttgcacttaccctaatatgtcttgggtccaggagcctggagaacgggtgctaatttgatggtttcaggctgtaccttttactcacgtgccaattcagatcagtgcatcctgatgggttgcccataggagagcagctcttcatggcaggggcttcactgtagagtcatttagtgccagaatgttgttagtaggtaaattttgttagttggttggtatacatattacttttccaatatttaattgcagaatttgcaggattcattgttaggcctttctctcatacctcatgggtattgtttattagggccagcctcaactctgctggagtctgaattctcataaggttcagcctgtttgtaagacggaagctgtccactgaaccaaagagctggaagccttcgaaaggcatgcaagattgaggtggaatcacacagattttcggtgataacctgcagagtggacgatggaggctttggaaagtaggatggcagccttgcaacagcctgcccctggccatgcttgccacacccttgctatcctctaaatctttaacagcagctgccagggagcagcaagagaggccaggacccctgtcacgtgggatgagatagcacctttggaattgtgctccataggaaagtagaataagcacatctgcaaagtagtaacctgcttgcaatgtcataggatgagatttaagatactgtgtttatttctttttctcccaaagctgtaagtcccatcctgttctctaagaaaacctggtaaaatcttcctcttcactgttatctctgtattgccaccactggttttaccatccaagggcctgtactttgccaggcactgtgcagagtgttttatatacttttccttggatagaagcagctccccctccttcagcaggtggatgccattcctgggttgtggatgaggatgtctgcttctggtagggcaagcgacctgcttgccccatttgactctgtttgtgagggcctgaattggaatttaagcccagggctggcagattacaaagccccctccatgccccttccctctcatggaaggagagagtaggcatgacccctcctctatacagcatcccacagcctcctggattttcattttaaaatcctgagaattgaatttgtgtatactcgtgtgttaaggatcaaagctataatttacaagtctcacaccaaataaaacttgagtgaaagattccaggctatagcaagtatttttctcatgttggtttgggccctgtaatttagtttctgtgcctttcctcttctcacctaattaatactgatgttaccttttacgtaaataaccctagcagtcccagctttccggtggaggcatgttggctctgttgagttttacaggctcccccggctcacagtctggggagaaatcctgattgaaatcttggccctctgttttcttggctgtctggacttggactcaagtgttggataggaaatctctggctgttaatgtgggggttgggagtacgggaagggcggggagaggctggccagggagggaggtttcccagcccttgctgtgtgtgacacattagaacactaccagggcttcctttctaacttaggaaaggaacggggccggggagtgagaggggcaggagggcaccacggagctgcctttttggggttggttttataaaatggttgtggtcactcctggttttgctatatatagctgtttcgttgtagccactcatttttttgctgtttttcatcaaaatgtgcacgtagatgatatttagttgggggaagcagggtcatttccttcccactgtctcaggcacgtgtcctaggctgttctgtgtgtgggttgcgttctcatcagccatacctcatgtggtcccctcacagtcaatggcatgattttatgggatgcttgctcaggtttatgcccacataaaacttctgagctgttgttttcgagcatcatttccacactgggaatatgctctgtttttctgtgtgactccacgtttactttggagttttaatatttcagtcaggatgattgaaatgctggtctcttgaaggcagacactgtataatcagaaggtagattgtgctctaaacatttaccagtcacttcctcctagtttgccctaggagtttctaaaactttcaagcttttacatttttatgtaattctttccgtttgaagatttctaggattaaaaggattggcctttaagaccctgggttgcttttgacctgctattgtagtatatcttttattttaaactaataaaggtgatacaaagctcaggtccgaattaacttagttgaattgtgattttgctgtgtagtttttggtcatttagttggtccatgtattaattgtggattacatctaaagttatttcggggtgggggtaaacttactttgagaaggcagaactcatcatgctcaaagaagcaagaacagcttcagatccccagttgtaagtatttcaccacttctgctttgtcttcctctgcttctctttctggatatagctaatttacatgttatcttgtttctgaaccatttgagagtaggttacaaatatgatgatgtcccttacctctaaatggttcagtgcatattttctaagagtgaggacatgctcttacatagtgatcataatcaggaaattagttttgatatgatatcatgatctaaatcactaactttaacacctttttaccaattgtctcaggattgtcctttttggcagttaaaaaaattatggtccaggatctcactcaggaccatgttacatttagtttgtcgtatctcttcagtttccttgaatttggaacatctcctcagcctgtctcccttgttaccctgatagttttgacgattacatggtggttattttaaagactacctcccagtttgggttgcctgattctcatgactaaattcaggctgtgcatttttggcagaagggctgcatcctttttggagcatcgtgtctgggaacatgtgatatccactgtcccactgtggtgatgagcactttgatcacttggttcaggtgatgacttgcaggtctctccaccctatttgtccctttgtcattagttagcattttgtggggagataatttgaggctgttcctctcccttctttcatttgctagttgtagcatccattgatgatcttcacctgaatcagttattaatatgatggttgcgaaatgttgattttttttctaactttgtaattccttttgtatttagttgactttgtactataaggaagagctttccttatcttccacttatttatttatataagtatggcctcagaaattcctgttttatgcaatgagctatgatcttttgctgtcacttagtttgatgctgtaattatctaagatttggctagtgggagccccttcatcctggctcttttatcttttgtgacctgtctccatcatttttttggagcactttcttactttctggcacaataaactgttccaggtgcaccttgtgctttccttgccccagggctgggatcagccatttctccaaggagcccttggagaaatggttcattttagtagtgaatggtatttagaaacacgatctaggcactaagcgtgctcattgctacagagttgtccttgcttttagggcctctcagtagacagagctaagaagtgtatgcgtgtatgtgtgtgtatgtatgcatacacatagacattaattacacatatgcaaacgtgattgagatctctttctgcacctcttggtgataaaaaccatatgtttagactcagtgtgtccaattccaatacagtaccacagggtgcattttagtctttcctcttccgtatttgtaattcccttctctgacagtgaaaaacctggctccttttatcctccgtatctttacttattcactcaatcctagaatatgcagaaagtaatttgagaatgctaacccacaccacggtgataaatgaacctccacccccaagtttaaactgttcaaatcagcagttagtggtcagcttctgttcagctcagtgccttgtcagttagtcatccaaacaaaacagatgaagtaatgctctgcagttccccaggggcatgtttaagaaaagagctgccagactccatcaacagcttactttctggtgatgtcggagcacaaaattgaaaaatcaggagtcgccagagaagaaagggagattaatttcatacagtttataaaaaggacacctgttgtgggaaaaacagtttgtcatcttcatctcaatgtacaaattgccaaagagaagaaataaaaaggaaagtgttgagccagtgagaatgggtgtgtagaggaggatgggtcgagcggacctttctcagggatccagtacattctacaaggaggagaagaagctgagttcatgtgttggagtaagctgtgagtcatgacttgaaagactgttgcttactgcccttcattgactaaatatttcttcccagaaaccacctgcagtaaattcaaagcagctatgtttctgcctcagtgcgggatttctgggaactgagtttatgtgcagtcagtcccagaaatcatggaacggtgggtgagatcttaggatttcatttgctgttctgtatttttcttttctctctctctttctctctctctccccctccccgcctccctccctgtgtctccctctctctccctgtctccctctctctccctgtctccctctctctccctgtctccctctctctccctgtctccctctctctccctgtctccctctctctccctgtctccctctctctccctgtctctctctctctccctgtctctctctctctctccctgtctctctctttctctctttctttcgagacagggtcttgttcttgcccaggctggagtgcagtagtatgatctcggctcactgcagcctccatcttctgggctcaagtgatcctgcctcagtctcctaagtagctgagactttgagcatgtgccacgacacccagctaatttttgtatctttttttgtagagatggggtttcgccatgttgcccaggctggtcttgaactcctgggctcaagcgatccacctgcctcagtctcccaaaggcttgagattatacacaggagccactgcacccagcctgttctgtgtttttctacattaaatgatgacacggatattacgtcgctgacttggggagacagtctcagtttcatatattatgttctgtactgcccataaacatcctcatgcttgttagattgtgttctggaaaatttggcctctgtatttctagcaaccctttctatgatgacacattttagcaagaaaaaaaatcataatttgcttattaatattttaatggagaagggcttttgatattagaaaactgggaataggccgggcgctgtggctcacacctgtaatcccagcactttaggagcccgaagcatgcggatcacgaggtcaagagatcgagaccatcctggccaacgtggtgaaaccctgtctctactaaaaatatgaaaattagctgagcgtggtggtgcacgcctgtagtcccagctactggagaggctgaggcagaagaagcgcttgaacccgggaggcagagggtgcagtgaactgagatcacgccactgcactacagcctggcggcagagtgagactccgcctcaaaaaaaaaaaaaatctgggagtaaaaagtcatgactaggggtagtgagaatgactgctaataggtcaaacattctgaggaaagtttttgagctaatggagatgttttggaattagatagtgatgaggctggaaacggtgatttctgcctgtaatcccagcattttgggaggccaaggtgggagaatctcttgagcccagcagtttgagaccagcctgggcaacatagtgagattcagtatctaccaaaaatttaaaattcgctgggcttggtggcgtgcacctgtagtcccagctgttcaagaggctgaggtgggaggattgcttgagcctaggagtttgaggctgtagtgagccatgattgtgctactgcactctagcctgggcaacagagcgatgacacgctgtctcttaaataaataaataaaaataaagaacaaaaagtcatggctaaatgtgtgatacatttcagattttgaaatagcttcagttattgagtgtttactatgtataagccacttaattttcctaccccttacaaagtaggcagtgataacattatacctgaggaaatggaactcagagaggttttttaacttgccccagctcaggtggctatagggacaaggttaccacgcgcacagtgggttctgccgggggtggaatccgcctgtgctggtgtctcctactctgacgtgcgtctcttatggaggaatttgactcagttttttctactcccactccccctctccctttttttggtgttagaaaaagtgaaatcacctctatttgaaggaggggattgtggataagatttgaccaggtttcagttgtgatttgatggcatatttggaaattttgtggaaaaacctgggttaacttttcaggaaatcgcagtcaaaaaaaaaaaaaaagagagagagactttgcttccctgtagattgtttcagtcctggtggtgtcttttgagatagtgaagagcatagctgaaaaagtggaaactgatgatgctttagcttttattgttttttaaacattctgggaaagttgaagggagaggcaactttctgctatgcttctcctgaaagtgatattaacattaaaaatcggtgtcattgtttttctgctagtgtgagctttatattttttttctttttttttttttgagatggagtcttgctctgttgccaggctggagtgcagtggcacgacctcggctcactgcaacctccatctcctgagcgatactcctgcctcagcctcccgaatagctgggattacaggcatgcgccaccacacccagctcatttatttttgcatttttagtagagacagggttttaccatgtttgccaggatggtctccatctcttgacttcctgatctgcccgcctcggcctcccaaagtgctgggattacaggcgtgagccaccgcgtccggccgagctttatattcttgaatattggagtcacctctgctcaccagcatatagaccgagacatagagtatgttgttagactctaaaacagaaacggcattaatttgcataaaatcgcatatgctctgttgcaataattttcattgtgcctgttttagaattgagttgacacttcatacagagtattccaactcaattaaaaaagagacatcgcagaagaatttgtgtggctttgaaatttattttgggcacagtccctgaaagaaatgagcctctaaggacttttgttctttgtggtgttttgaaaccttctcgccagttatatacattaagaacacgtagagcaggttggggttggtctgctgggtagaatgcctgcaaagggaccagaggtctgtcagaacaagagtctcttagtgcagtgcctcccgccggggggtgaccttttcatgatgtttggactgtcatctttgtttcccagtttcaaatgcctagctcagaattatttagtgcttgaagtggttttcatcttcaaaggacgttatggacattatttaatatacatgacactgtgtaatgaatgagctgtttatcccttgagtaacgtcaacatgccaggtgccatacagctggagaagacaaaaataatactctgtccagtgggagctgatagtctaaagaggcaagatgattaggcagattctctcttttggcctcttttaaaaatgtgctggggaataatgtagaaattaaaattataaaagatgatcaactagctcaagtctacctaattgaaattgccctcaaggtggaaatgaaatttgagatgctcttaaaaagacatcatgtgttagctcccatttatcacacatttactggtacacgcctattttacttgtgttacaggtgaggaatttggtgaagaccagtgcagaattattctcagatctccttcccgactcgtccctttctcccactgaagctcctctttttgtttgcatggtctaggatggcactttgtaaccaaggccacatgtgatgcccaaacatacatttattattttttttgagatggagtcttgctctgtcgcccaggctggagtgcagcggtgtgattttgactcactctatcttctgcctcctgggttcaagcgattctcctgccttagtctccttgtaactgggattacaggcatgcgccaccacacccggctaatttttgtatttttgtagagatggggtttcaccatgttggccaggctggtcttgaactcctgacctccagtgatacaccttggcctcccaaagtgctgggattacaggtgtgagctaccatgcctggctcaaacacacatttcttagttgcagatcagtctgtcctttgtagctgggcagacctcctgggaaacttggacttcttgcccctgttggcctgtgtgtcttgtgctcttgtacctgtacctctttgtgtttgctgttccctcttcttcctggtttcccttcctaactcagctcaaacatcctttcctttggaaaactgcacttgaccatcctgtcccagcctcttgaggcccattggtgttggcatgacactttgtgagaactggattctggactggttcctttgggttataattgttccttcactcgtgagtttgagttgctgggacctctgaccccagcgccggcccagagcagtccccaggtagaagtgcagtagatggttgttgtgatttatgcctgtggttccttaactcagattttagcataattacctggaaagttttctttaaaaatacagaatccctagagattctgatttagtggttctagattaggcccctagaaatgtattttgaaaaaactctacttgtagtttgttttgagacagcgtctcaccctgtcacccaggctagagttcagtggtgtgattatggcttactgcagccttcaccttgtgggctcaggcgatccacccaccttagcctcctgagtagctgggattgcaggtgcataccactatgcctggctagttttttgtagaaatggggtcttgccatggaggccaggcaggtctcaacctcctggactccagccatctgcctgtcttggcctcctgaagtgctgggattccaggtgtgaaccgccatgcctggtctctactgggaatttagacgcacagctagggttaggaaccaccgagttatgccaaggcacagtattagttgtgggttatggaatcacggccaatttggagtaaggtgtaagtgcagtttgcagaatcattccattcacatatctggagagagtggagaaaatgaatgcagtccctttatgatgaggatgtgctccatgaaggagaagatcctggctcgtggaggagcttcctgctctgtgaacatactgaaggcacaattggcccttcaaactctcatttgaagtcactgtgttgccatagagatattgtgtagtgttgaaggagattagagaaatcatgtcgtaaattatcagaacagatggcttgtaatttaacactcttctagcccatattctttgtactgaccttgagaacattgaaggtatcagtttttactttgttcttttacctataaaaatggcagagttcatattgagtgagatctaaaatgggtattagatatgccacatacacagtgtggtatgtgaaagcattttaggagtggcttccttaactttgcttgtatattttcccctcagttccctggatatatagaataatgagcctgtcttccttattattttgatagcactggtcagggatcatttttatatcctggcttgatgataatcgtattcctttgcaagtgcagttctgtttgcaagtattatatgatcatgtagattcaggcagcataatcacttccaaggtgtttttatatgtcatcaaccacataaagggtattttctttttttttcttctcttttgagacagtgtctctctctcttgcccaggctggcatgcagtggcacgatcttggctcactgcagcctccacctcccaggttcaagtgattctcctgcctcagcctcctgagtagctgggagtacaggtgtgtaccaccatgcctggctaatttttattttttgtttgtttgtttttttgttttttaaattttactttaagttctgggatacatgtgcagaacgtgcaggtttgttacataggtatacacatgccgtggtggtttgttacacctatcaactcatcgtctaggttttaagccctgcatgcattaggtattagtccttatgccctccctccctttgccccccatccctggacaggccctggtccggtgtgtgatgttcccctccctgtgcccatatcttctcattgttcaactcttacttataagtgagaacatgtggtgtttggttttctgttcctgtgttagtttgccaagaatgatggcttcccacttcatccatgtccctgaaaaggaaatgaactcattcttttttatggctgcatagtattctatggtgtaaattttgtatttttagtagagacggggtttcaccatgttggccaggctggtctcgaaccacctgcctcagcttcttaaagtgctgggattataggtgtgagccaccaggcctggccaactaaagggtattttctaaaaggagacttctttgaaattttttctgtctctctattctagcctgggtctgatgtgtaagtcttaaaagattgtatccttcattaaggacaactattgcctcttgcagggagctgcatcctgattgggattctggcacattcacacatgcacattgttgtagatgaccagagtagatatgtacctaaaacatttcaaattaacaaaatcataatcctgtgagtgtaatttaaaaatctaataaagcttaccttatttttaaagtacttgtagttagacatatattaacacaactatttcatatggttttattctcacatgcttgaagtattcaggaatcttaaataggctcttcatacattttcatgagcctcatttcttatgtgtcatacagtaggaaattaagtaagttttccgatctccagataattcctgagttgctcttgtgtgaatgtgtgttttaactgaatccagacattcatagtagtgagcactttctttgactccttttttactagcctacactgcttatactaatgggggtttctgatgccactcagcagtgggacagagaggtcagttgtgagcctgaccctgttggatatagcaatttttacctcaggatgacacattcacgtgacttaaattctttgacacttctgtgtcaatgctagaaaattttttataaaagtgctaggtaattatatcagaaagcatctgaaaaacagtcttatcagaagggcttagagccattacaggagtgagggaaatagtgtggaaataagctataatttccttgatgagcatgtcatactacaagacaaggttggctcaacctcctggtaactgtcctgccccagaatgggctagctccagcttaaataaattggaatcagattacctgggtattgaattgcatggcttcaggagagggtgtttggttctgtaaagccacatgtcatggtagtgaggtgagactgatggtagtatttgttcaagaatccgattttcattgagggcacaaaggctctgttgtgccacgctcaggatcttgttttcctgagattgcttcaggcagatttaaacaatggcctctcaacgtactggatttaaagagtaagtagttctccatgatcttatttctcattagtagggaaatgtaaacttttacctttggtcaaaattttgctcctgtcacctgaccccctgatgtcattatgattgtcttttccttgcagtattgccttgtcagttactcttgccagagggatttcatcattggagtatctgcatgtctaagtccaattcagctctttacatataggccccatgccctaagtgttgctgtcattttgcctgtttagttactttacaaacactaatggcacgtaaggctcctgggaaccctgggtctggaacaggcacaggccacagaacagatggcccttgccaggtggtccttgggtgcacagtggctgtggagctgctgtctctcaacaaaggaaggaagggcactctcagggaaatcaaatggatcaaagccgtccccttacccgtgttgcccctttaagccttcccagtagctctacttttatttttattttatttcaacttttattttagatacaggggatatacgagcagatttgttatgtgagaatattgcttgatgctaaggtttggaatatggatcccgtcacccaggtagtgagcatagtacctgatgcgtagtttttaaaccgacaccctcaccctctggtagtccacagtgtctagtgttcctgtatttacgtccatgcatccttaatgttagctcccacttataagcgagaacatgcagtatttggttttctgttcctgtgttaattaagattatggcctccagttccatccgtgttcctgcaaaagacatgatttcattcttttttaatcaatgcgtagtattccatggtgtatatgtaccaccttttctttatccagtctaccattggcgggcacgtgggttgacttcatgtctttgctgttgtgaatagtgcagctgtatttttattttattcttcctgttgaccctctgtctgtctttctgaggctctgtgtctctgtggacccttcaaagggactttcctttgtttaggagagtgactcatcctgaggtcattctcaacctttccttgggaagggatgtagcccttcgcagacagagctgcatttgcccagaagtaagcattttcacaaaggcccctggatcccaggtgccctcctgcacagtgaactctaccggtggtgtcattcttagccttgtgggtctgggtttcccagcctccagaggtaggaacgccaaccatcctgggatggtaggtggccgctaggcccagatggactgcatccagacctgctgagtgaatgaatgcctttcttctgtaaatggactccttatcattctgttttagctcctctttttctcatttcttcctttctcctgcatttctcttgtttctcattcttctttgaccacttaagagtgacggtgtcactcatggccattgcccattgctaaactgtgctggaggcagttagagatgagtctgatttgtggggcaggaatttagggggatgctcccggtggagagtctgttggattctgcattagcacctcactacagacttcacctgggggtaagccgtgcctggggggcacccccttcttttctgccccaaggccctgggtctgagcctgtcttcttctgcatgtccccttcctgtctctcagtcgtcccgtcacttagtggggtctcttgacacttaattctcttactgcttgatcccaatcccctttaagcacagttttgtctgatttaaaatttgcattttatggtgatcttaatagatttggcttagcaaataagtgtgatgcttcttaatttcggggtaatttaatccctttttctaaattgtggtatattattccttaaaaattgttttggctcagttgccctggtgtcatgtgatttcttcttgacgttttcttttccgagctgcagttcatgttgaggttaactcctactcatccctctgccccgagtgctcagcacatagtcagtgcttagtaagtgttcaccaaaagcaagaacaagcgcttgctgcatccccaagtccagtggccagtttccctgtctcaggaggctggtgggacgtggtaactattgagccagcaaaactgggccagaggctgggccattttatggtgtaatgtcctctccagtagaaattcatgagaggggaaaaaggagaaagggagacggtagattcttacggatgaggtgtgcgtgtctgtggaatatgggcataggcagcagtggagaagggaggtctcagcaaaagcagctacccctgtttgttgggctgtgttcacttggcaagttgctgtggatctaactgctgttcactgttaataattagtcctcaagcgcccattcttgggcttatgtcttctgcacaattcctcagtctctagattgaccaggctccccgtggaccctaattaatattttctgaccgatcactgggtttgatcagtcaatggagggtgaagaagcatccattatcaggtttcctttgagatttaagatctagttgcctctggtgtttctattatgtgttaatgagttgatttctgtttcctaatgattaggctgtggaacagtaactctggggggaagatggcattggtaagatttgctaagttcttgggtatatttttacaggagtatgttccatgagcccgttaagaatgttccaggtcttgccctgtctccccatttccatacttcacttccatttttaggacttctccccagcgtcaaaactttatttacacgaacctgaaagcaggctgcagggctgtttgaaatcacacacgtcaatatgaggccaacccagtttttcataaataggtcagattgtttctataaagcaggattccaaaaacagtcttgttaaagaaaaagtattttaagaaaagatacccattgtttaaatcttaaccctattgcctagggcttgggataatactagtactagaaaatgctgatttctggggcctgccttggaagaactgagacttgccccagacatcatgaagagaaagcttgcaggccacatgtactaagatccggggataggtgtgagtcagaggctgggcaagggcctctaaggagctcttggtgcccttgaagaggagcatggttctgggtggatgcaccatgaagggctgttactggcagcattcactagtccccctgacccaccaccagtggaacaagtacccttgctttacctaaatactgaacattcatttcttacttagtagagattgacttaaatctcttttttttaaattgtgctttttaatctatatatcagaatcatctgataattgtgtgatactgaggaggtatttaagccatagcaaatcaggaagggaagaagctaagatggggtttacaagatagttcttcacatgtgtctgaaattagtactcttaagaatgttactaatttctggcaggatccctggaaaagtttctagaacaattggaagagaagccagaatagctgtgaaaaatggcggtgttcacaggtgtaaatactcacagcctcacactcaagtgtgtcatcctgaaatcagtgaaatgctctcactgatttcatggaccttatcatccgtgagaactggatatgccacgtgtttaattcatgactgagttttatgtgctgttcacacagcctaatgcaagacattcacttgaagaagtttaccctgaaatcccccaaatagggaggtcccacgtaggtgaactaaataggctctctacaagtacattactcatatttttaaaataggagattcccaagtggatctggctattggccaacagaatgagacttacacagcctgatataaatcggttcatttctccttgtactgtagttgattttcaggaggattgatgtgcaatttattgtttgtctgcagcagaatgacttgtatggctctgggtgctgttttctagtgctgtgtttgtggtgcatgtcttcttcctgtttcttctgattctgagttccgccctttttagctagcattcagttggtctggctttatttgacttctttgacttggtgagtgccatggtttgtgagttatactatcatttgtggtttaaacatttcagtttttgttactatatgtccatctatgtggccatcttctcattttaattaccaatacatgtttcagcttgctttttggaaaaagtgttgagatgcaaatgtgtctttggaagtgtcactgagaaacccaaggtctatctggcattccgctcctggcggcagaccgtagtctttgtccacgggttgggaagagagctgtgaaacagggaggccttgccgactgtcctacctgcaatctggactttgcacatggagcctctacttaggggattagttttttgactactgctgtttgatttttgctttttaattgggttatttgaggtgaatgcatggtttaggtttctcgttctttgtgttggacagaattaaagggaaatttgagacatcctggtctacttatgttcaactccgttatattcttttttaatgggcaataaaactgccttttttttttttttttacttttctcttttttagatggaaggttccccatttttatttttacatcacgttcttcctcatacagttttcttcaacagtaccaagagtcgtatttttaagaaagtgtctctaaattttctttgcttttgtaggactatgtcatttctgatgatcattaattggtatgcctaactctcccctttgacccaggtattactaatattgactgaaagatggaaaatttcaaagatggaaaatttggattactgctgtgtctttaccattgagtcccaggaaataacttgcccagtttcataaattcttagacgttggtttctcttgtgattgtcaagtctttggtgttctttactttattcacctggaccacttgagttgttattcatcgaacacacacgtgtgtgtgacatgaagtataacttgttcacccttactttgtgcagtggtggtaataaaattgttttaaacctcttaattatggtttttcatgttggattcactgtgagttcttaaaaaaaaggatcacccactgatggattcaaatctacctttggaaaattaaagtgataagcacttaatggcattttgggattagcttgagaatatctgtaagttgattgtacttgaaacatgcagttgtgttgtgaccatctgtagagtgatgtggtaattaggcaaagcattttagaaaggctttattactaaaaacaagtggtagctagttttcataggcaaaggagacagtcttttagaaaagtggtgttccaggtgatttaatggaaagccaatgaaattggggagagggagagggagagggaaaaggtgaaagaagttctgaagtcaggctgcttggcaggcaccgagggaattgactgatggagctcatctgtaatcctgggatgcgttttctgtgttttatccaaaccagcgatttttgttataacatgtttggaaagcctttttttcttttttggtaagtttcctactagacatataaaaaagacttataaagttctttgtgagagctttataatatagataatatctagcttttttctttcgtaattaaaaaattcaatggagagattatagtagtttgtatatactgtagttagaaaggtttggttttgtttaaaattgttgtacatttgcttttggtaatctttagttgcttgaaccctccacccttcagtttaacttttatttaaaacaatctttgattcttattcatgcattgaacattggctgagaacctgctatgtgctaaacagtcactaaaagtgaagcttctctctcttttttttttttttttttggagaagtcttgctttgtcgcctagcctggagtgcagtggtgcaatcttggctcactgcaacgtccacctcctgggttcaggtgattctcctgcctcagcctcccgagtagctgggattacaggcgtgctccaccatgcctggctaatttttgtactttagtcgagacggggtttcaccatgttggccagcgtggtctggaactcctgacttcagtgatcctctcgccttcgcttcccaaagtgctgggattacaggagtgaacctctgtgcctggctcgagatgtaatatattctcttgaaagataatattacatctagggaactatctttatcactttatttaactatttacattgaaaatactagaataaaatataagtacatatttgtttttaacttaatatacaatttcagtgttagatgaaatgaagatggaatattaacaatgtataagtaatgaaaaattactgaaacttgactctgttttagcattccaaatcttaaattatattccttgccctaaaataaaatatcatgaagatattttgggtgaacagttggaaattgttacaattctagagtattaaagataccaagaacattcagaggatccagccgaacctgacttgcccaagaaaataagtaaatcatttagtttgtcacttcagtttgcatgaccacaaagaactgtacacgcaatgagttattacattgttatagaagaaacaaaatattttataatagtttgccaaaaatatcatgccattatgagaaaaacctgttgactaagtcggcctttggtcacagtaaataatcactgcttttgaccaaaactgcaggaatgtaaatctacgtttttcagtgtttgaaagactttaaaattgcaccatataaggtaatgctggctaactaaactttataacatttgaatgtagaccataagctgatgagccggaggtcaaaattagatagctgtaaattatttgggctaatgaaggataaaggtagagtttagccaaacactgttcttatgtagtcttatcaccggtggaggtacagatggatatcacccacagaggtgtgggtaggttgcttcagaattaattttttaagaaactgttaagtaatagagtatctgaaactggactgtgtttaaggactacttagttgctgttgctgggtattattcagtcttaagcttcttcctggttataaaattaaaaagcaagaaagagacggcaggaaggagcggggtggggggatggtcggtggttagtagatatgtggacctagagtagccttttcagccagtttgggttgtgaaatactgctgagtgcttatgtggccaagttctgtagttatagaagattatgtatacacactcttttccattttgcaaaagtgagcaaagatatccttgtatgcaaggtgtcataatcccattcctcttatgttttgaaaagaattacatacacctgcagataagttgagtagtgcattgagcatctgaatacccttcccttcaattcactgttaactttttgccaatctgttctctctctttctatcttttatattcattaggacactaataagcactgcagcattactaagctgtgagttacttttgcttgaagtcagtgtcagttaggttttagaaagattgtgcatatttttgttttaatttgtcttgagggcagattttgggcttaaaaatacctctgtaactgaatagccaagcagtacttgcccctgagaagcaggaagtgcagcagatttagtagaaatgcttgaacaaatctagcgtcttggttgaaattgactaaagttccaaaataactaaacagtgtcacagagagtagtgacaggcagactcatctcagaagcagtggctcctgtcttctgagtgacagtcactttcaagtggcagtcagagtgttgaccaggcacacagaataaagccccttctgttgaagaactggcttaatggagtgggacaggttaacaacagttgattaaaccaaaacacaactctaaccaggcagaaacacatttggtcacaataacaggggggatgatatcaaaccggagtgttgtggctatgcagtgaagtgcggaattagaggtggagccttcgtggcatcactgaggtggaaggctttttcaagaccattggattcagttaaacaaatgagttgtagaatggggataagctgagggataagtaatcccatcctttacggaacatattttttggaggtggaactggatacagcaaattacagcatacagaataacataggtgctatcttgaggcaggtgtcatatccttgagcctgctgagggatcagagtggactctggaagagctggcctttgagtggggctgtgaaagatcagcggtggagcgaatagtcactcaagcctgcaacttagggtatagggaggaatggggtggcccacccaccagcccctctgatggcttctaaacatttgcaagcagcaaaatcttttccaaaaatgcttgtttcaggggaagttgatcactaggcatgggtaatatgagaaatgtgacggttggggtggtcagacctcttcctctaggaggtccaggagtataagttactgaacagccatctcagatgctcacattgtatgttcctttttttttttttttttttttttttggcgggagggaggatttatttttttgagacagaaacacaggctggagtgcagtggcgagatctaggctaattacaaccttcacctcccaggttcaagcaattctcctgcctcagcctcccgagtagctgggactgcaggcatgcaccaccatgtccggctaagtttttctattttcagtagagacgggctttcaccatgttggtcaggctcgtctccaactcctgacctcaggtgatccgcccgcctcagcttcccaaagtgctgggattacaggtgtgagtcaccgcgcctggcctggtaatgttcttaagtgttctgtgagccgctaataaaaatcaccttgtcttcatttacagaagcaataagcccactgttttttgttttgttttttgtttttcctaggaggctacaggcaatcaggaataattagataaggattgggggcaccgttcatttcagtaagagcagaatcgaagagctctacgcttaggacagattaagagactgacttcacccacttaggctgataatgtaattttggttttctatgtttgcttattgctaattaaaagcagtaacagtgatagaagagcacagaggtttgctttgttttccacatgtaaattagaagcgtctgtctctgtgactgttactctcctgtagtagtttgtataaatgtagagccacatgctgtctgtatgtcttggctgttctcttgaaatacccagtagtgctgcccaaatggccagcagtgagcaccagcggctgcaagtccatttatgcaaggctgttgtaggaaagtaagacagagaaatatgtctgctgacatgtgaggtcactaaagtatagattctttgtgtactgtttagagagatccacttgatagagctgctgatttatggagaaatgagcgctagttgccttccacccgtgtggctgtaaccttctgttgctgtggttgttaacagtccccatgttgagcaggagcatgcagagtttgccctacgctttcagagcctcacttagttaaggcacttttggttgctggagcaaaaaaggaaatttattttcagaataaagaatcctctgagctaacccgagggaaggtggtataaccccacctcaccccaagaggaactgctgcgagtgggaacaggcaagccccagcaaagctgctccaagtttgtttctgtttcctgtttctccctaggggtcggctttatgcccgcctgcctctctatctacccagtcaacttcctctcaccttcctagttcaagacaggattgatgagcaaccctgaaaagtttcacatttctgatggtcacgtgatgggtcaggccatctggtcagcagtcgtcagggtcgtatacaacacacacaaggctgcgggcctgaacccttgccccaagaagattctgccacagagtttatggccccagttaagaagatgttctttgatcactttttgtgacattccctccataggtagaggtcagatcgccaaataaataatagtatctagagtcagggattttagtctacagtcgagacctatgaattttggtaggaaataaatgaattatatctttattttcgtggatctcaataaaattcagtatttctttcaattgtgaatgtagttctagcagtatctgtgacttttcacctgtggatactgcagatatttttaatcgacattaattattacagatctctcaaaatgttgttcatgctcatcacttcaaaactgtagaagttactagaatgactgctattttcatttaatgtgtggtaaagatgcacatattactttaaaatcttttgatgatcattactattttttttagatataattggttttctggttaagtttctctatgcacttaaaaacagtgttctgagaagagcttcataagtttcaccagattgccactagttagaaatatactactcccccaaaattgctggttggaattgagattacagttttctctttatggctgtcaggatttaaatttttctttttttcttaaagttttgggatacatgtgcagaatgtgcaggtttgttacatagcacatatacatgtgcaggattcaaatgctttctaaaaggcgttttctaattcctttccagttttttccactccttacttagaacttctttgtccctttcaacaattcctacttcctttaatgttttaatatctagtaatagattccattttttgtttgctttttgctgcgtaaattatacattctttggagctaaagattctagattattatagtattgaaagttagagatatgtctagatacaaaactagatctgggaacataaccccagatggggaagcaccatatattttgcaagcttgtgtttctcaatgttagaaatgatgagactcagaataaagcttacttatatctacctgggcattttaaataaaactagttttatttaaaactagtcacattgaaaattacacaaatatttgggaaactcccctgtacaataatgtagcctatttctaacatagaatactatacatgcatttagtgagagctccgcaaaatctgtgcgagtcatgaaaatagacgggatacctagactgctaatgtcctgggttggggagatacaccttatgaaagaaaagttcacaaagtgtcatgttacagtaaaagtatttcctttgcatcaatactgatttgtgaagaatatctgaaggttaatgcatttgagaataccaaatatcaaccataattcttatttaaaaatacattgtatgctaattccttagaaaagccaggcagggtggcatatgtctgtaattccagcactttgggaagctgaggtgggacgatcacttgagtcgaggaggagttcaaggccagcctgggcaacaaagtgagacccaccctgtctctgttaaaaacaaattcagttcattctttctttaaagacagagtcaggctgggcttggtggctcacacctgtaatcccagcactttgggaagctgaggcgggcggatcacgaggtcaggagatcgagatcatcctggctaacacggtgaaaccccgtctctactaaaaataaaaaaattagccggacatggtggcgggcgcctgtagtcccagctactcaggaggccgaggcaggagaatggcgtgaacccgggaggcggagcttacagtgagccgagatcgcgccaccgcaccccagcctgggtgacacagcgagactctgtctcaaaaaaaaaacaacagagtcttgctctgttgcctaggctggaggcacagtcactgctcactgcagcctcgattttctgggctcaggcagtcctcctacctcagcctcccgagtacctgggattgcagccgtgtgccaccacacctgactaatttttgtatttttttgtagcggtggagtttcaccaaccaagttgccttggccggtcttgaactcctacccacttggcctcccaaagtgctgggattagaggcgggagccaccatgcccagcctcagttcattcttttaaagatgattttaaaatttagaaacatgaacttttcaaaagtaacattttttgcttactgttaagtaaatggaaagagccaaaacatttaatttttcttaagtcacaggcacttgaaaatctggttttaacttttctttatggccattaaatattttatgcacatattacagggttgataatattataatagattcattttagaaatgaaacacttgaccattacatttagtttttataagaatattcttaggtaagcacaaacaacctgttttcaaacactgtgtgtccagctttacatactgtaattgggttccatggactctgccctgaggtttgagcgcccagggcactcatgggttgacagtggtgagcatacagttatgccccaggagggcaggtgatttattctggaattcacttgagtgttgaaaacagattattatttatgttatatacgtgagaaaactcttacaagccaccacttttaagttttgcttttagtggcttatatttcacaagtttaaagggcacttttaaattttttttggtaatcaccgggatatgagcagatgttatgaaaatcttcttatggggattttcaaacatagaggtctttttagtgacatgcacttctggcacttgtgtgaatttcatgataattcttggtatctgactgctctgaaacgcaccatcctaggtttgtaccatccttgctggagctcctgttctggaacctgggtgtcttcaaggatagcccaggattcttgtacttttaagcctgctacctgtggtttatgatcagataggaaatttaagaacaacaacaacaaaaaaagctaacagggtagagagagaatattgccgggctgactggcttccatccctcgctgggtcccagagcccaggaccccttggagaggaagaaccactcctcctgtctcctgcccagaggtctcccacttctcatcagtccctgggcttgggtgcctaggagtttcccttctgcctgtcttgagggctgagtatatggactgcaggaaggaggggctgctttgcatcttcatgctaatgcaagactttctctggaattttcacaggcccattattaaacagaaaagcaaaatcggtcctcaccataccgtggcttggctctgtttctaatgcactgcaagtattttatcaacattgtctacttttttgttttacttgattattttatatttattcaccatttaatttaatattacagatactgtttgtcatgtgtttggcttttgtgtttgcttttaacaaatactcttgtattcatggttttccttgtttgtggagtaattcattttgccacttcttttaaccattcttccctaaaaatagtctgctagggcagagattccattcggcctttattactttggatttgccaaacaagcagcagaaacagagttgtacgtgtggtcctacaccacaaggatttttaagagaggtcatttgtaggtgatggttgttgacacaggaatgctgtcaattaaaaaaggggagaaaatgaataatattcaaatttactggcatagagatgtttgcacagattccatgtgagagacgtaggctgttaatcttgtgttctggccgcatgttaggaaccctcttatggtgtggataaaaagccttgtgcctgcctggtattagaaaggtgacaggtgttgctgtcaaatattgatgctttgatatcttcacatttcttgataagctgaccgcgtaattgtctaaacagagatggtgttgagagtgaaagagggtgttaccaataattattctagaacagtaggggtaaactgagactgtgtctgtcaagctaggatgtgtgatgactcgacctactgactgaccatagtttcataattcagtatgtagagggtgagagtcatgtgaagatatttatgactcccactggtcattttttgtggctcacccctaacttggataaaatgatgtttgactcagtccaggatacataaaggcatggacagttggccaaggagagtggtcacaggggtgctgctgagtcagcacctcctgtcagtggtggtctgtttgaaaacagacctacagcacatttgaagaagcctcctccccatagcctggagtggctgaatcgctcattttgtgtgtgagctaagtgtgacttgagccatgaatcaggatttgtcagcccccaggacctggcttgcgtcctacccttctttaccaagagctcagaagggggtctttgtactccccccacccccgcagaagccgggactggagggtggtgagaaagcctttgtcaccgccttcccatttggagtgagggaagagttttggtcatagtcccctgctgctcccggccagcacgtcggtgtcccgtcctgccacccaccccgctttggccccaccccccacctttgtgggtctggtgtctcagaatggagagagaaatcctgtttagcagttaggtaccctgtgacttctttaccatgtgctagactcaaacatacggtgaagttagaggaattgttttgtatttgttcttaattactctgtaatactacattacaattttaaaaccattttaaaataaaaatgtattcttttcacttgttctgccctcagaattcttcagtaatataaatatttaaataaatcaacaaagcttttttttttttttcttaaaatctggattttttttagggtctcactctgttgcccaatttggagcagtggcacaatcacggctcactgcagccttgagctccgctgaagtgatcctcctgcctcagccaggcatgcatcacgaagcccagctcagtttttgattttttttttttcttttggtagcagtgcagtttcactgttttgcccaggctgatctcgaactcctgggctcaagccatcctcccagcgtgctggaattataggcatgagccaccacacccagcctcaatctggaattttacacatattttaagttcatttgatttttgaacatgtattggctaaattaatgattaactgtctgggcatggtggctcaggtgtgtaatcccggcactctgggaggctgaggtgggtggatcacctgaggttgggagtttgagaccagcctggccaacatgaccagtagaaacctcgtctctactaaaaaaatacaaaatcattagctgggcgtggtggcacgcgcctataatcccagccactcgggaggctgaggctggagaatcgcttgaacccaggaggcggaggttgcagtgagctgagatcgcaccactgcactccagcttgggtgacagagcaggactcctgctcaaaaaaaaaaaaaaaaaaaaaaaaaaaagattaactgtaatatagatgtggtaaagcctatgcgttatattccctagttttctggcacaacctcttaaagttacctggatcaaaagctggttacatgctgatattttcagtctgtggcctgaatttccaaaccgatcattagatgttgcctggagcttcctattctcattggattaaaaaagattattttgaaggtaatgggacaaaagaagataactgactttacaactttttataaaactatgctgagacttagtattgtttgaaatgaaagctgttagtattcttaaataaataaggattgtttgccttctaaagaatataacctaaattgttcctttgtaagaatcacatttttaacttaaataaaaaaggcagaccatgttgttagaagtgtctgatctttgcatatgaaaatataggccagacacaatggctcatgcctgtcatcccagcaagttgagaggccgaggtgggaagatcgcttgaggccaggaatttgagactagtctgggcaacatagcaagatcctatctctacaaaaaaataaaaagctgggtgtggtggcacgcagttgcagtcctagctactcaggaggctgaggcaggaggatctcttgagcccaggagtttgaagctgcaatgagctctgatttcatcactgtacttcagcctgggtgacagagtgagtggtcccatgtccccccagtgcccccacaaaaaaaaaaaagaaatataggtaggtaggcagttttaattttcttttgaaatttatgatttgagttggcttattttctgtatatactaaaatatttaattttgtctagggaaatccttcagaaaaaagttaaggtataaagaacatgcaagaaaattgtgttcataaacattcacatttagaattttccttgtttccattatatggattataaaaaaataacaatggaatactacaatgtatttttttttgtttcattcttctattagctgtatttcttaggctcttacctttttgtaggacatacagctaacactgcagacttaaaaaaaaaagacatcttatttaagggatatagaatttctacaaataccgtattattcttggatgccttaaagtgtattagagaaccatgaaaaggaaatgtcctttcagatactggcctgcttgaaattttgttagtacttctctgaagtttttggtgtttgttgaaactaaaattgttgtgggctgcttcacccgagcccagacaaatctgtagaactagttatctgtcaccgtcatctgttgtttcctgcctggggggtccctggcactgtctgttagaacttcacagccattctgtggcctgcccaatctcagaatctgtgatggcctttgtgccagattgcagatggtcgtgggcaggcctgtgagtggatgtggagcgtttctggggggcgtagtctgtgagatggcacgtgggaccactcacacaggacctgtgtctacggttgcccccaggcagctgcactgcagaaatcctttgagggccatttcagtgtcctgaaaacgctggctgccccctgcttgacttagagaccaatgtcaggggtctgtaaaggtggattagaggattgaggccaagttcagagtcttgaatggatggcaggagaaagaagagaaagtctgaagaccacatggtggccacgcccctcccggcctgggctcttttgcatccccacttgccctcactattccttttctggtagtttctacactccgggctgatgtgggtctgaaattctaggtctgacctcatagaactctccagaatattcagtcctctgtttttaatctccttctccccatccccatcctccctgacttgtatttaagaaattaatattttgaatatgaacaccacttcccacatatcattgaatttcatgttattacttttggttcttcctgttcaaatctttgaagggcattttttttttttcttttcatccaacacagtaatgacgtctctgagctgtgtggcctgaagatttgataaacgagacttctctgtgttattcctcaggagcaggctcctctgggaagtgggaaggaccccggctctgctgtgaggctcagggagagagagtgcacgtcctcctatttggtagaaccgcctattactccttgttggttccctcttagctgagaaagcatcttggttccctggatcttaatgttagtctttggctcactctttagagatgcttctaccttgggacaaatttatatctgatagaaattgttgtcagagtgtaggtggaatagcaaagttttagaaatgattgccttatcaaatacaatgcaagtttcttcttgtccatagacatagctaaaaatcttgtggtaatacatacatgattcaatgacagtatcaattctatgccttaattttgttgataattaaagtgttaaaaattagtgagaaatttacatgtaggagcttggtctgtaagaaaatgccattaattattacacttgctgtactttttctctgattaaatctcatgatttgcttttctttctaagacattatctgttggaacattcactagcctttaagaattcccttaatttctcctgacaggtgaagtgctccctaggtatgaatttggagttctgatgatttttaaaaatccttccctgattttccagagatttcctaaggaaaattggaccaaatacagtggagacccccccccctccactttgccgtgcactttgttctagagcaagggtggcagctacaggcatttgcgtgcccctgcctgcaggcctggctgtagcgcatcatcctttgtgctccctttcctctgagctgggccagggccccatccttttccgcaggcctctgggcagcaccaggtagacaacagtgcatctctaggatggggccagctgctccatgagctggggaggtggggtcttcgttagggttcagaaggatgcctgttccttctggcctcctggggctaactccttatcacagctaggtttgttcccggtggcctggacttttacagaagctacaaccttagtgaggctttcccttgctcccctccgttgaaagtctctgaactgcagttctgtgggacgtatgttgtgcccttgggagtcatttttttgtgacttctctccatcagcaagattgtgatgtaagcaggggcttttctctccccttcctttaatagtaagtatgcagtaaacatatgtatgtttacataatgaaaaaatatgtccttggagacttgttgctttaaaagatgcttaaaagggatcagtttgttaaagtactctttcagaataattattgcatcccctaaaaatgtaaacaaataaagtattactttctttgactaaaattgaaaacaataaactcctcccttcccccccaagaaaagccctaaagaaactctgagtaattaaaaagagaaaaaaacagaaaagaatttaacattgctatttaaccatcagagtctcatttttttccccctccataatgggtttggtttcagacttggatcaaaaactggaacaaaactttctgtgctgtttctgcccctcccgtttgctgaggagggaaggcatgcggccgcagttacagcatgctggctgctcctcactgcccatttgggatatctagaggttgtttgttggtgttctgggatcctgagggacactgccaactgttaacctttggcagatagtgactgttttacttcgattttattttcgtggtaaccgttttttaaaaaagattaataaattacccaagaggacatggcagaaggtaaggatgtgtcccagactttaaaaaatacagttcttattttggctctctgatgtgtggctcgagggtttctctaggaggactgttgatggaccttgacctcagagctcctaggccagatgagcagccatgacagagaatgttgtgtgtttggatggttgggtgccatgtctgttaaaaatccaaccggctagtaacgaaacgccttgcagaaatcatcctgtggggatttagaaatgtttttttaaaagagatttgctcctcagcttagcaacagcagttctgttttgagagccgaagggagcactgtgcgctgtttgtgtatccgctcagcaaaatcacagtgggaagctgctgcagtgatgtgtcccaaggctgcaaggccaccttgtcccatggcctctgtacagccatgggatcacagcttcccttctgcaacgtgccctgcactctactaaaggcacttggcaatgttattgagactttgaacatatgtttttagaaaataatactgagcaaactataaagcttcagtggactggaaaagtgtttgcattttctttatattagcctctagtgtaattcaggacttcattgctatggacgagtctaatttcccttgctaattgtttatgttttcatatgaacaccacatattcttagaggaaagagcgcatctcagcatcttttaaatgctcctgatacaaagtcttaatgtaaaacacttgttctagtatgtttctttccagtacatagcctatgtagttagttcttggtgtttcagaaaaaaaatgaagttaggttagtgggtgtgagcgtggacgcctcttgggtccagtgcggttgcggggttggtgccctacagccactgctgtgcttccctcctggcgtctgtactctaatctaatgcacgagggcagtcctactgctcattaatcacgtttagtgttctcactcctaacccaaaatcgggctcctccttggagcagcatacttggtgccaggcttgggtggacgtcaccaatacctccttattcgggtccatctcagtcgtccatgactcatggacagttttaggatttccctaaaacttatgtggactgccacatctcaaaggcattttagttattttcagtgattttcaatcctgaacatctgggcctttccacttcccccataaaattcgccccccttccccgccccccaccaccattctctctctcctttccttcttgtttcttctaaaggctaatagtgggtgttctcacccttgaaaccagaacagtgaaagttctggaggattacagaagcacttggtcctattttctttcacccaaattgaatcctgaaaactcctgatgcagactgaatggtgaatacttaaaaacatgaatagcacagttcttcctgggcctaactggggtgggcaccctttgcatagctgtgatgaaaaacgtgcccagcatagttgttaaacatggcagccacagcacgtctgctggctctgagcaggctcccaggcccagactggccacacacgcactggagctggctggatcccttgccacctgcccctgcctgcacttaggcagagatggctcctggctgaagagcagggagaaactggggcagctcttctcaggccaaatgcctaggaaagggtggggaggggctgaaggatgagtgaaaatgattgggagaagacagagggaaaaaaggctaagttgctaggaacgtggtgggtgagtgacattcagacttggcttgcccctcttacagacgggttgatttctctcatttgtaaagtgaaatggacaaatgtgagtccttggtgactcactggagcttctcagatcttacccagggatagtctagttatgggtggtggacatggggtggggtgaggagtgtggagtttttcatcttccaattggagaagactgttttgcaattttgagtacctccgccagtgaagaactgtgcaaaaggccgattcctagttgtgccctagtaaatgttttcagaatattttcctaggcagctggggaccagagtgttttgaatagcttgttaaacagacttttaagaggtacacccaattagcactactgagtagtatttagatgttgactagattcatgggactatgctggaaaataaattgtaaactcaagtgtgacattttaaaccagcttttggtccttaaaaccactttgcctgagctggagacagccagtttctcccttgtttttctagcctgatcaccaggcttttgagctctaggctggccttcccaactctcaaacatattccttttatagaaataaaagtacctggcctctatgatgcataactgtgagtcatccagtggatattaaagaactccaaaaacatgcttcaagatagtttttccactttgttccagagcacggtctaaatttggactcattggaaatggaagtgaaaggccccgatggaacctttctggttgctgccttctttgagttgctgtggtgggtgggcagggacagacagccttacctgcacagaggcatggggtttcttgcattcatttctgaatgagtcggcctgtcgtttgcacattagtgaccaatttccttctttcttttttttttgaggtgtagtctcactgtgttgcccaggctggagtgcagtggtgcagtcttggctcactgcagcctctgcccccctggttcaagcgattctcttgcctcagcctcctaagtagttgggattataggtgcatgccaccacacctggctgatttttgtatttttagtagagatgaggtttcaccatgttggccaggctggtctcgtactcctgacttaaggtgatccacctgtctcggcctcccaaaatgctgggataaaaggcatgagccaccacgcctggctagtgatcaatttctaatgattgagactcttgggcacaatgccacatgattttgtcatgctagtgtgaaccaatatcctgttcccatggtggataacgttatattaatgtttagtaatatttgtgcaaattagatagggcgtgagggcttggtaataccaagatatgtaaatgtggagaagtcgtgtgatgaagaagttacttgtccaaggcagcctaaagcgatgaaccagaacctgatgctagtattttagggaatgtcggttctggtctctcttacgtgtctaattatagtgtcaactgcaaaaagttgataagtactaaaatgtattatactttttccccactccactgtttcaaaatgtagtatatagcattaacaaggactacagatctaatgcccagccaacagttaatgggagataaggatttttacggaaaagcagaagttgctagatggtttttgttgttttgttttgtgtttttgatggctgggactcttaaggtacagagagaattgccagtctttctgtattaccgagaaattgtaaacatctgtgttgtgggctttatttttattccctgcagtccttaacatgacatctcccccataattgactctcagtcagtacctttgactctgtttttgaaaaccattgtaccgaggagtgggtctaacagccacaggccatcctatttaatctaagtaagttctatttcttctgtttgtagatttttgaactcaagagcaaaagcgaatatttctaacaagatttgacatgtgcatttttaagtagatgccacataaaagtccaattaagtaaaaggtgatatgaatgtttattttatgtgaagtacttttaagtgattattgttatttaggtgttgcgttctgtggagtttcctcattattaaagtaatgtatttgtttacaaaacaatgacaaaatgagacttatgggaggggaggaaggaattattaacataataggagaaagggctttcttatggggataaatgtgttttgtcactgaagtttttatttgttctgtcaccgagccaatctttattgcgtgagaagcagaccctgctgtattaaatgtgctgatgggaaacccggatgtctttgcttttctccttgccagccgaggagttagactagaacaccttcaagatgagctgtaacttttgaatagtgaacacagattttataatatctgctggtgttttatttgtcacatctgccagtttacctaaaattaaaattttgaaaaccattttttgtggaaaggacaaatcatgtacttgttggagttctgggctgaatattttgtgatgtggttttcaagtgatcttagaataattatgatgccagctaactgtccttgagtgccaatgctgccatgtattgttctcattgcctgtattatttaataagtgtaatattttctccattttacagatgaggaaactgaggtacagagagattggttaagtagcccaaagtacagagttagttaagggatggggtggtttgaacctagttcttggcccattctcttaaccacttcgctataactgttgttaactaaatcatatagtagacatgagtataatttaacacaatttgtcttttatatgactgatgaaattagccccgtgggtttattttcaatgccttatacatactaaagttatgcaaagtgtttctatttttgaatgatttttctttccttattttcattgttttcccctgcactgttgctgataaccttacaaataaagattgtaaaagaccaggagaaagataagcatgccaatcataagttttggttctgtacagttttcctctttgacccattgatgcttttcagctttcccactataattcttcattaatttccaggtttgtcccgcgcattgaattccatggtttttagtgtagtttcttgccttttagcctgggaacttttgggtggggagaatatggtgatgtagttcaagtcgaaatactagcatatgaatactttcagaagcccatacacttgtgtgcacattaactatgtttttagcagttgagctttggttcattgtagtgaaaatgtttttccatgagtaattcttaaatgttggtcttgagtttttaccacagatgttacaggtttggccatggctctctcttgaaaaactcatacaaattgccagtttggtataagcgttaaggaatcacattgctttttaattgtatttatttctatttttaatatttgagctttaaaatattgtagtagtattgtaaaaatgtatctatatgttatcctacactaagcctaagctttaatgaggatattggtacctgactgtcctgtacttggagcatctgtccacttttgaatacatgtaacactttgatgctcctgtccccatggtttgatgaagtacttaataccttgaatgctatatttattatcaaattttgaatgaaatcactagcctaaatacaagtgagatgtttttgaaattttcatcacctttgaaacacctagtatttctgtagaattggattgaggagggcggaaagaagggttaatccccccaaatacaaataacagcagttcctttttatcataaagtaaatgtgtggcctgggagaatgtgttggataattctcatcttaggttgtacatatatgaccaaggcactggataaattcacacgtgagtgtcgtttattttcatgcacttagaaacgtatttagtactgtttctgccagtctaagccttaaaaaggtctgtagctcatttgggattgctgagagctgaggagctgctgttctgaatgtcttcgttttaacttttttttttttttcaagatggggtgaggtcttgctgtgttgcccaggctggagtgcagtggcctgatcgtaacttactgcagcctttgcatcctgggctcaacctgtctcagcctccccaggagctggaactataggcgcatcccaccatgcccagctaattttttattttttgtagagatggggtcttgctgtgttgtccaggcaggtctcaaactcctgggctcaagcactcctcccacctggccttcccaaagtgctgggattacaggtgtgagctaccatgcccggcatatcttcagatcattcatatctggcacagacagttgacctttttttagtcaacagagctggtttgcacaggagattgtaagtgggtctatagagatggaaagttacaggttccatctagtagaggctactagtttttgaatagagggagagaaatctattccaaaggaattgcttcctcaatccccactggccactgcttgtgcggtgccaggcaagagggtggactacaggggcaggcagtccagctagcggcacagccattcagtgagtcaggagtctttgtgcaaggaaggctgaggtgatgacagagctaacagcaaactcagacaatctgaaaaagaaaagaaaaaatccagaaaaatcaaccacatatgcagatactgaaaactatttttggtgaacccctttgtgcataagagatcatttacaaaatatgtgtgtgcgagataagtctattcctgtaaagaaatctgagtcagtctgaggagagtgcagaaatctgagtcagtctgaggagagtgcatttggtgccgtggaagcgtcatgcttgtggccgttcctgccctgtttaaatgattcaggctcatgaaatgtctgtataaagaatgctttaagttgtcttctccgactgccccttattcacttaaagacagactcatatgactggggcagtgacttgtagagcttctggtcctttgcaaataccatgctgtcctgtcttaaaagagctgactaaattaaaaaaaaatccacctcaaaaagaagtgaatggctgttatgatcacctcagaagtatctcaggacaaatatacacacacaccccttcatctgacacctgtggcttttaaaaagaaagccagataacggatagccatttaatcagtttgtatccacacaagcacttctccgatttccctcatgcattaggtaatgacactctcccctgagattgatatgtatattataattaataactagcgcagcgtgttctccaaaggggcagctgcaggaggaataccacagcctctgctgtgacccgcagacctcagtgggagggacatgggacatggtggctcgcactgtgttgaccagcagcccctgttcattgcatggctgggtctggttcctacctagtgggtcaaggctgatatattaaagttctgatgttttgtctcaaaaagaccaatatgacctagttggagtacgtatatataaatgtgtatgtgtatgtagcattctatattcacaagcctttaagtgatttttctaggaattaataagaagtaaaggccaggcacagtggctgcacttgtaatcctagtgctttgggaggctgaggcaggaggattgcttggggtcaggagtttaagaccagcctgggtagcatagctagactctatcgctacaaaaaaatgaaaatatttagctggccgtggtggcacatgcctttagtcccagttacgtcactccatacactccagcctgggtgacagagtaagaccctgtttctttaaaaaaaaaaaaaaaaaaaagtggtagtagtagtacatcttctattcctgtttttagaatgggcacagcaaactgtccacttattttcatcattaacatatggaatgtaatttatgatattttcttagagaagattaaaatcataggtaaagtgaatagggaagttaattctgatactgaagttgacagtaatcagaacttagagaagtaagccacagccagtcaggaaaatcgcagactggaaaagataattattagtaaagacttcttgtggttcttaataaattgtcttcctgaacctagtggctctgctccttcaccataaaactctgattttgttgattaacctttttgtattcaataacaactctaaatggctcatttattgtttaatgttttctatttttcttttttataccagacaaattaggagatgttggcatatcaaagatgtgaagaaaaataaaaggaattcagaaagaatcatgtatctaatatccaggagataatgtagttgcattgattgtgttgtaaagaagaatatatctagcattagtaatggcaatggcaataatgatgacaataatacagattgcattgagccatatatacattatctcattccagtataaaagaagtgcccccagcaacttcttggacgccaaggaggtttccaaattatttattttacaaactcttactttattcccttttttttccttcttctttttttttttcccccaagaacagagtcttgctctgtcgcccagggtgggatgcagaggtgtaatcttggcccactgcaacttctacctcctgggcttaagtgatcctcccacctcagcctcctgagtagctgggactacaggtgtatgtccacctgtagtggatgcacgcccaggtaattctttaaattttttgtagagacaaggtctcactatattgcccaggttggtctcgagtccctgggctcaagtgatcctcccgcttcggcctctcaccatatttttaagaatgagagggaatgctattaataatatcagtattctgggataacaggtgcctataaggcagttgataaaaagaatataatgggaccctacttactccctaaacaaatgtctttgaacatttacaggtcaagaatacaagagaggaaggtctgcttaataagtggagtacattaactcactgacttactctgggttgctattgtattaaaattctgtatagacattacgtagcctcagagttgaatttggactgcccttaaaataaaaaattcttaaatctttagtgtggtgtctgttaatttttatgatgatttacaagttggaaatgattactttgcaagtcatagtttactttgaagttaataagagtgattacagtaaaggaaaaatgccatatatggcattgttcttaacagcttatgaaatttggaaaacgatattttagaaagctttctcttgttggctggaatgaagtggagaccctgctgggaagaaactcagatatgttgataattactgtaattatgagagttcagatttggaagattgtctgaaaatctgtgttgccatgcagtttctggtagtaacagttttgaattaatatttattgtgtgatgcagttattaaaatatgtgtagtagagtaatactgaagcaatatatcgtgacacaaaaggatattcactataaataagtaaatcaggcaattaaaaagcagtattattatttgtattcattttttgttttaggaaaaacgtacctgtgggcacacatatacagataaaatactgcaaggatattttactaaatttaaatgcttatttgaggattagtggaatttaattttatctccttgtaactaataaattgaccatattttctgtttagttttactttaaaaatatgaaaacataaacattaacctgtttccttttattgaagtgctggtgtgtattctaaagctggctagttttttatgttcaaaatagtgttttcaagtaatggaatcattccgtcatctcattcttagggtcaaaaacaaggggtaagtcactatatatcctctagaaaatgttttgtaaccagttaggcagccatgtggttggcaaatgttcaaacagttcatgtccatttttgttttttaggtctctgcaaagtcagctgtcagagagtatctcattgaacacttcctttgattatttccagatacatttatgtgactaatttacgcgaaactggagaataagacctcacatacattcttatagcctccaaaaatattacacatgatggcaatgatgatgaggatgctgaccttactgtagataacagtgaccgtttactgtgtgttcgtgtgcctggtacagactctgccctgaagtccttacctgctcctttcactagactcagtagtctgtcttatcttcccggtagtttttcagtattctcagcaaggaagctcatcccatcagcagttgtcgtggcctgtccaaaccctccatgcagtgagtcttcttcaggttcggggacatagacatagcttctgtccactcaaatgttgaatatccctgcattgtcaaattgtacccattactcggtacctgtctacctatagaagttcctttaaaaaaagagctgtctttttactacttcctggcatgtagttttatacattgatcggattcatattattttgtcttacaacttgatgtctaaatatgtaagcaggtgggagtagattgttttcttttgtatttctgctctctttttctctgtaaagtttttaaatggaaataaagtacataaggctcgtattatgtgatctcttgttggcagtataaaaggttttataataattgttttctttctttattgttatacaggtgctccattaggtgaagaggtggagaagggtgaaggatttgaggacttgatttgtttttaagttaaatgttaggttgctggatatctctagatatctagctagtaacttagcttttgaaattcagtgaaatccatgtttcaagggtgggatgttattccaggaattctgctgaaataaacagtatacagaggcatatctctgaatatttagtcattgccagtggcaaagttggtaatgctgctttgtggtatgtttaatagaggaatagtgtatagcctttgtagataatgatttaagtctgtatttatttttacagaaaggtaaccacatacacacatatatgcatacgtcttttaattttgaaacaatttcagacttaaaaatggttacaaaaattacacaaagatttctatataccttttacccagatatcttacatgttaatattttgccgtttgttataccacttatacccttctttctgtatttgcacatgtatcacctagataaactttttttttctgaaacatttataattaaggcagacataatacttcttttacctttaaatatttcagtgtatttttttttttaaaccaaggacattctcttctggaagtaaaatgatgaaaattgggaataccacattcattcaatgctgttatctaatttacagactttattcagatcttgccaggtgcccattaatgttctctatttcgtgcagtatccattccaggagcacacgttgcatttaattgcagccctctttagtcttttttagtctggaagagctattcagtctgtcaatcaggaccttcacagttttgaagaatacaatctagttaattctagcaagtttgctgaacgacccttgatttggatttgtgtggtatttccttgtgatgtgggtgggaatactactgaagggtggtattgtgctctctgtgcattttgtcaggcaaggtgttgatatgcctgtcctatgggtgatgacataaactttggtcacatagttaagatggtgtccgccaactccattgtcaaattgataacttttttctttgtaatgaagtgtcttgagattctctgtgaaagtatgtaaatatcttattcctcatcacacttttacccattaattttgtactcattcatgatttttgcctgaaccagttgctagtgtggtgttcgtcaaatggtaatttttaaattcttccgcttattccacttttgtagtttaagtcctactgtaaggaagagctttcccttctcattgacttaattgttcagaacaggctcatgggtccttatttgattctgctgattgtgatctgttattatcatgattgactggattgctccgattgttccaggctggccagcggggacagttcaggctgtgcctggtcctgtctttttccaagcccttgcttattttttttgtctgttctctttcagtgtgggggtggggagaggcgcagttgtggattgttttactagattttatccagctttttctccatatctgtatttgtataaattttaaaaactgagcattatttaaatgtttatgatggttgcctttgggttgtgggattactggttattctaatttgtttttctggaaaaaaatcagccatctagcacatgtattatttatatcaaggaagaaaggctttttaaaaacattgcaaagatttgttgtgaggctaggcatggtggctcatgtctgtaattccagaactttgggaggctgagacggggtggatcacctgagatcaggagtgtgagaccggcctggccaacatggtgaaaaccccctctctactaaaaatacaaaaattagctgggcgtggtggcgtgctcctgtaatcccagctactcgggaggctgaggcaggagaatcgcttgaatccaggaggtggagattgcagtgagctgagatcacaccactgcactccagcctgggcaacagagccagactccgtctcaaaaaaaaaaaaaaaaaaaggatttgctgtgagtggtggaaatcacgtacctctaagactgactgagactatcttgtgttttgcacctgtcatttgagagcattcatgttttccagcacacatcatatgtgaaatggagcactgtcactaaatactgatcccatgacttgaaatcattattctaccttcagaagctgggaagtcattacattataacctgtgctctccccgtttcttaagacagatgaggcacctggtgcctgcgaagttaggttacttgcccaaagtcacagagttaattgagcagatagatgttctggctctgagtccagtgttcttagaaaattcttaataatgttttgtttgttaactgccttctaatgaccagatactgaatgaagttttaaagatcctttagcttaaatttgcatatgccattcgatgagtcatgttccaaaattttatatccgaaaattatcaaaggccatttggccatgctggatgattaacaacttcaggtgagtctaaattgatttcttggtagaccatagctgtggagtgctgtgattactgcctggtgttcaatgcgtaattacactgttattctatacttgtaaaaaacatcgttggattggaagaatggaggcctgataaatttgtgctgtttaaacttgtgaactttctctggaatcaagacatgcctgccagaagaaaaaaatctacttgggcacgactaagtgctatctgtagattgccaaggaagctttccccgcccctgtgacttgctgtgagtcccctgggctgtcctcccctctgagcaccagatactgatttgttgtgcctgctgtggtggtaattacataaagtgtgtatcgaggtgcttcctgtctgtcttatccccagctccgtcctcagccccagtcgcagagcctttctcacagcaggagtgcaggaaaaatgagaatgctctttaccctgtccaggctatcttgtggagatgggtcttctcttgatctgtatccctctcttttcttgtcttcttcttatttttaaatactctgatttttaaagcagtcatatcattagtcagggcttttggttgcaagcagtcagaactgtctctagccaattataagcatctcatatggcaacagtagtagttatttgccaagaactatgaagggtctgagcttctttactctatttgcaagctaggttaacctgccttagtttgctagcaaaagacatgagactcctgggtcagacagaggactttattattcacagtggtaacagtagtcatgatatcagcatttgttttttgcaccagttcttcaagccctgattctcacagagcgacttgcagaaggccagttgtgcacacacagtgggttgcattgcaggaaaggaaccctgaatataaggtacccgaatctcttatactggactgcaagcatgcctgctttttgttcttaagggagatgctgtctctgtcttccaagtctgtaagcatacctgccctttgctctggaggaagacactattctctaagtctattcactataaaaatatccttgtaatgatagtccagaacaaagatagtcattgcctctgcttaaatcatgtacagaattgcaagagacccacggagaattatctaccaacaatatgcatcatagaaatttagaaaacagaagaaaagtcactacagtcctaccactcttactgttaaggtttttgaaatatatagagttttagccataaatataaatgatttcatatagcatgtattttataaaaattggtttatactgtacattctatcttgtgatgtgatgtttttcacctgccactgtatcatgcccatttccctctctctgctgtctgtattcttcttgatgtggtgaagcatctttgcccaatcttctgttcccttgtgccctgctctctgcctaacatttaattgtactaagtatacaatcagagttttagaggttgaagagcagagatttcagatcatctggtccaaccttttcatttaacatgtgtgttaactttctcatttaacataattacatttcactgagaccttctggaaccaacaagaaaaccttaatatggaactgcaatgatgggaatttggggcattgaaagaagttgggttggcaacattgcttgggtgatttccttgctaacattgtactgtaaggtgtgagggcctttgcattagactctgactgggctctgtaaacctgagcctcattcttagaacctcttgagccccttgatgttgcccagtcaagtccatagtgactgtaggggctgaacttcaagggccacttttgcttatagccatcacctgagagcacctccagaatcaaaatggccttgggaagtacttgccccagagagagttttaaaaattattctgtcaatctgactcaattccttgtagatagttcatttccaggcatgtattttcttggagtttgttaaaaacaatggaaaaatcttatcttaaaagtacctcttgggccgggtgcggtggctcacgtctataatcccagcactttggaaggctgaggtgggcaaatcacctgaggtcaggagtgtaagaccagtctgaccaacgtggtgaaaccctgtctctacaaaaatacaaaaattaaccaggcatgatggcaggtgcctgtaatcccagctacttgggaggctgagatgggagaattgtttgaacctgctgcattccagcctgggcaacagagtgggactcaaaaaaaaaaaaaaaaaaaaaaaacctccctaaaaatgcaactcaaagtgttaagtattcatatttctagattccattaaaggcagttgtgaggtatttatattaatggaatttgccttgcttaaaaaaattcaggaccatgaggttttggattattaatgcagaactgctaaataattttttgaatggtagctttctttcaaaagccacaaagctgtgttatcttgctttcaagaaaatattctttgttgaatgacttaagcttattagttcttggaaaattttaaggatgtgctgccttcaaacagtaaaacaagttccagctttttgtactaagaagaaactgttgtcactaaggatcagctctgctcctggtatcagtgggcttatggagaggatggcagagaagcttcttgggcctgtggcattctgcatcctaatgaccatctcctttttctgttccctgcccctctcctctttctttccccctccccttttatcctaaagtaggggatttataggatgatggcatttactaccaaagctttgctggccttgaagcaagcctaatttccaggtggcatcttgagatttgtcttgtcctgggtctgaccattgccagaccatggtttcttcagttggaagtaaggctgtacctattccaagacagggagttggggaggagaggtcagggccaggtctgttagaatgagccgagacagacttaaaagagagaacatagacagcattctctatgtggagtgttcaaggccaacggttatgattaggaggcctggctgaagtagcgtcagctggttttctagtgactatactagggttgtgagatcttagtgtcctggcaactagacagtggttcatacttgggcttctgccctgcaagagagtgagagaaccagccaggacagcagtgtcctctgggtgccaggcattatgtactaggggcttggcttactgtgccattcagccaggtggccgtgccctgcccctcccctccctgccatccattatatgcctccatccttctcagggcccttcccttccccgtgaatccccagcctgaggtcgtgcttaagtgccacctgctcaagagagaaggcttcctgcccgcgcccatgatgtaagtccccccagatgctttccaccatcctgtcctttgtctgtaattgcgcttgtcgcttgaacagaatcctaattgtgctgattacatgtttaattttggtctcccctgtaagacaggcatgctttttggaggcagggactgaatgtcattcacatctgtgctcctagggtctaatacatgatggtgcattgtaagtattcagtatataacttgttgaataaatggatcgggtttagcattttcccccattggacctggattgacctggaaattggtggactgaacctgcaagtagagattaaaggacctaacaactgtagagtggctggtgaaggtagatataagtgcagtaagggagggagtcattgatgttgttttggttcgtagtgcagaataaagctacttatggaaatatacgactcctactcttagtttctgctttgatgtggttactgctgttgtttagcgtaagcatataaacaaatcactggcttagtgggttaatttttcttctcttttgttaaacagctgagtttttgctgttttcaaagttagccaaaaattccattttcatgtttaaatgatttagaaaaatcatttttctttaaaaaataacagtacataaaaagaaaacattctcggctgggcgcggtggctcacgcctgtaacccagcactttgggaggctgagacaggcagttcacctgaggtcaggagtttgagaccagcctgaccaacatggagaaactccgtctctactaaaaacacaaaaattttagccgggcgttgtgccacgttcctgtaatcccagctactcgggaggctgaggcaggagaatcgcttgaacccgggaggcagaggttgcagtgagccgagatcgtgtcattgcactccagcctgggcaacaagagcgaaactccatctcaaaaaataaaaaataaataaaaaataaaacgttctcatctattttttagagtaatttaagaagattctgcttcttgttttaccttatatataaagtacgacatgagttaaaatcacaccttggttatagcagctttttaaaaaaaattaaaacacacttttaagtaggaattccaacactagttaattacagataaatacatagcatttttagtgaaatgctttgctaaggtcatatcctgtggttttaagagcatttggcagcatcgattgttaactttgaggattacgtgtagttattctgataacagaaactttcctggtgggtaggaggcaagctgtgttctaagatgatcctgtatctggatcaaaggagagattgtaaaaattacttcacttagtcagatttacttggaaatattaatgaatttgttctgctcatttgttaactctgaataaattgttcatctttttaaaactaagttgtctgtgagtcacaggcctacatttatataaaagcaaaaatacagaaatgattaaaaatctgggccccaagaaataggtggacctgaatggcagtcatgtttacttggctttgacagtttcaagaaaaaagttgaaaattgcgtgttctcactcataggtgggaattgaacaatgagaacacatggacacagaaaggggaacatcacacaccggggcctgttgtggggtggggggaggggggagggatagcattaggagatatacctaatgtaaatgacgaattaatgggcgcagcacaccaacatggcacatgtatacatatgtaacaaacctgcacgttgtgcacatgtaccctaaaacttaaggtataatttaaaaaaaaaaaagaaaaaaggtgaaaagttctgttatgaacttgtgaaaacagcatatagcatatagataacccagcattgctaggcagttctaaggacccgtaccaggcttgtccaacccatggaccaacacaaattcataaactttcttaaaacattttgaatatttttgtgattttttttttttttttttttttttttttttttttttgctcatcagctatcgttagtattggtgtattttatgtgtggcccaagacaattcctcttcttccagtgtggccccagggaagccaaaagattggacactcctgacctactatgagcaagttgaagtgattttgaatactgtagctcatgttgtgattaccagtatctccatttgatatgctttgactgtgtccaaacccaaatctcatctttaattgtagctctcataattcccacatgttgtgagagggacttggtggaagataattgaatcttcagggtggtttaccccatactgttctcgtggttgtgaataagtgtcatgagatctgatgattttataaggagtttccccttttgcttggctctcattatctcgtctgccgccaagacgtctgtgactgaccctttcctgtactctgtacaatggggcctcactcttccggcagtgagacatgcctttcaccttctgccataactgtgaggcctctccagctacgtggagctgtgagtccattaaacctctttttctttataaattacccagtctcgtgtatgtctttatcagccatgtgaaaaggcctaatacaccattctggtcatttataatttttatttatgcttttatttataatttttaagatccactcagtcaacctacagtcatgagaaatgataagctattatcgtttgagccatgataagttttgtggtggttcgttttgtagtaattagatacctgatacctcaggttatagtcgtaactttttaaaaaatggagtaaacaagtttgattattctgtttgtgtatattgggcactgaatagttatttcccaaactgtaatctgttcttaaaaaataatggcttactgcattaaggatttttccaaagaatgtcctataataggcaatttgaagagagagattccagaaggcgttgagtcctggcagtgttcctgtggaataagtctgcagcatcccaaggtgattgctttttggtatcttaaaagtaaaacagcttcattccttgtgtccagaaacatttccccgcaaggactacaaaagccttacaaaacatcatcatcattctcacagtatttttagaatcaagtaggaaggtaattttctttttttacagaccatgtttcctggtcagatatttctggttttgtacttaataatgaaataagcatattaagacagagatcttatgttcacctgtgagttttatggaaatgacctttttatattgttagaataaaaagtaacaaattctaagaaacagtcttttaaaaaatgtatgtagtaattgtccggtgtggcgttcagtgccctcaagcatgggaatggagcccttgacgggcatctgtgactgaccctttcctgtactctgtacaagggggcctcgctcccctggcagtcacctgccccttgctaggtgctgaagctgtacaaagcctagtccttttctcagcagaccagggaaaggggtgggggtgggctgatggcttattagagaaacacagcaggaatagcgtgtaaaattgaagaaggaaagtgagcccttgttaattgtgcactcaaacctggtagctttttcctttttttctcttatcgttacgttgcacctcagaagatgcctggtacttttaagtaaagcaacaaatgtaggaagaattgaactgctcttttcaggatcctgatggatgtctcaaatgtttctagaccttgataaaagtacttgagcctgtcaatagcctagacgttttaaaagctgcttatgctttttatttcttgggaaatgcttgttttgagttgtgtgtcttgttttaagccaaacaagtgtcatctgtggttgtgctgctagtacatttctgcttgacctcacaataaaatactgattttgaaagcaccagcctgtctttttaccgcagaggtaatttgagagaggagtggagggtgcccggggaaggagttctgcactgccagcctcatggatgccagagagaaaggggagttcttttccttggtcgatggtcacagaggaggaagagtgtgaacttactccttttttgttctgcaggttgtcttggtctgtctttatgatcgtgggcagcttagggacaagcaaggtcctggcacccatggttgagtgagtggaccacatactaacattgtatggtcagtgttggtctctaggtcttacgggaatgtgtacttaagtatggtggaacaatagctaattaagtagagatttcaagaaacaaaggatttgaggaagatattgcccaaaataagactattgtatattatcctatgaagtcctgaaccctgtctctcattaaaatgctattcagattttggggaacagacatgaagtaaaagatacagtgtaacatggagagttaacctaaggatataggagcttagagcagtgaccctgacctgggcaagtgccttcccctctttgactctgtttcctcactgtaaaatgcagataacagtagtactcattcactgggctgttcggatgattcagtgatttaatatttgtaaagagcctagaacagggcctgccaccatgtatacactttagtaataatattagtcaggggtgtttctagccgtgtagaagtctgggatgcgtggtgtcaccccttcttcagggttcctcttccaagctctttttcctgctctctgtttccaccgtggctgcagtagagacagaggccaacatttgtggtgcaaagggaagtgcccacggattcaggagggcacaggattttattgtcttaaatcattaactattgcccgaaaaatccacagaacatcgttgtgtaactgcagctgcaggaagtgtctgctttctggcctcagcgccagggaggtggagttacttagcacatccaccgcatgcttcctgggctgtttcttttgtggattgcaaattctttggaaaatagaacatgtgatctagagaaaagaagaaaataagaacaaaggataaaataattgtccccgtaatgtagcagctaacagtttcattcagaagtacctgaaacagtgaacagtagttcctcagcatttgaagtaatgttacaagtcaatacactgttcattacgttagattcaaaatgaaggtctatcttgtatctgaagttccttggccagggagaggataaaaacccctggaaaaaataggaattatgcagctgtagttacaattaaatttaattcatgaaaactacatatcatacttcataataacattaatttttattatctggctactgtgttattaacacaaaatataagaattattagtgtttcagaagatgccagttggtttcttactaatgaaaacattatacgcatacaaatacttttatacaaatgtttttcaatttatttatttatttagagacagagtctcatgctgtcacccgggctggagtgcagtggcacgctctctgctcactacaacttctgcctcctatgtttaagcgattctcgtgcctcagcctcccgaatagctggaattacaggcccgtgccaccacacccggctaatttttgtattttagtagagaaggggtttcaccatgttggccaggctggtctcaaacttctgacctctcaggtgatctgcctgcctcagtctcctaaagcgttgggattacaggtatgagccactgtgcccggccaaatatttttcattttaaaatgtactttttatttatttttatttttgagatggtttctcactctgtcacccagactggagtgcagtggcgcaatctcagctcactgcaacctcttcctcccggcacaagtgatccttccacctcagcctcctgtgtatctgggaccatggcatcgcaccaccatacatggctaattttttgtatttgtggtagagatgggtctcactgtgttgccctggctggtcttgaactactggtctcaagcagtccacttgcctaggcctcccaaaatgttgggattataggcatgagccactgcacctggtctaaaatgtacttttttagaaaaagaaacgtctttttaaaaaactaagcatactgcttaattcctctagattcttgctcttgtcttgaggactttgcatcctctgaactcaacttgtggtcagattctccggatgtttcttatcctcgaaagtttaactcaacctctttctcccagtaagcctctgaggtcccagcagcctctttctcaggtcccgctgcccttctgttctggcatgtgcctaacctgacagttgctgccttgctcctgaaatttgtcattccatttcgatggtgcctgtgtgttacctgtgtatgactgaagtacatattcgttatctgcgtgagacagtacagattggtgtatagtattttacagccacttcattatatgctatttccgtgtactggcaaaaaagagaataaaacttcctaggatataagtacctactgctgttttggtgcatgtccagttaggcttttctctttttatttgtttgtgtacctgtaactccatataagcatatataatcatgttacatatgtttaaaaggcgtcattttgcaatgcagttttatcactagttttttctctgtcaagggatgtataaaaatggatcacaaatctaaatttaaaactataaaacttaggagagaatctttgtgatcttggattaaacaaagatttgttagataagatacagaaagtatgaacaacataagaaaaaagtctatagtttaaacttttttatattcagttttgcttttcaaaatatacctttaaggaaatggtctgggtaaggtggctcacacctgtaatcccagcactttgagaggctgaggtgggaggttggcttgaggctaggagttcaggaccagcctgggcaacatagcaagatggtctctacacacacacacacacacacacacacacagccaggtagcatagcaagactgtctctcacacacacacacacacacacacacacacacacacacacacacagagccaggtagcatagcaagactgtctacacacacacacacacacacacacacacacacacacacacacgcagccaggtagcatagcaagactgtctctctacacacacacacacacacacacacacacacagccaggtagcatagcaagactgtctctctacacacacacacacacacacacacacacacacacggagccaggtgtggtggcatgcacctgtagtcctagctgcttggtaggctcaagtgggaggattgcttcagcccagcagttcaaggttacagtgagctgtgatcgtgccactgtactcaactccaccctgggcaatagagcaagaccttgtctcagagagagagagagagagagtgaaaatacaagccacagaccaagacaaaatatttgtaaatcatatatccaataaaggatttttaatccagaatatatgcagaacttttataacacaataaaaagaacaaaaccaaattaaaaattgagcacaagatttaaatagacactcaacaaagaagggcaaataaacacatcagaagatgttcaatatcattagtcactaggaaaatacaaatttaaatcacaatgaaataccactactcacttagaacagctataataaaaaagattgacattgccaagtgttgatgagggtgtggagaaaccaaaaccctcataaattgggaatataaggttgtacagtcagtttggaaaacagtttgcagtttcttaaaagtttaaacataggcttatcatttgaaccagcagtttcactcctgtgtatctccttctaaataaatgaaaacatgtctgcacaaagacttttctacgaatgtacagccgtattactcataatagccaaaaatgaaatgatctaaatgtccaccaactggaatggataaacaggatgtggtatatcatcatcatatccagacggttaaatactcctcagcaataaggaacaaatttctgacacatgccacaacctgagtgaacctcactgactgcatgctaagtgaaagaagccagacacaaaatacgacatattgcatgatgccatttctatgaaatttccagaaaaagccaaattaggcaaaaaagcatttcagtggttgccttggggtatgggccggtgagaggattgactgcaaagagtcacaaggaaacatttcagagcgaagaaagtgttaaaccaaactaaagcctgaagatgtctctgtgctttgagtccttatgtaagcaactgtaatctaacttagtatgtaaactaacagaaagtctaactgaagagtatacttttgtaacaaatagctgactctcagccaatcacagcagctgggcttcagttagtcacaagtggacagttcatcagaccttgttcaaataaggcaaaggctgagctttaaccagttgagctgtttctgtacctcacttctattttctgttcataagtgttacctacctgaagtggaactctgaaccctctgctggttctaagggttgcctcattttcgaatcatcctattctcagttaaactctgttataaagtttgtttgtaaaactggattgtgatgttgtaaaactggattgtgatgctggttgtgcaattataaatttattacagtccgtgtaaaatgggtgaatatttttaaaatagtgcaccagaatttattcgacaggtcgcagtttgccattttctgtttcatctagtcctaagaggtagattacattcctgttttccagaagaggaaactgagggctagtgccgataacttacaggtctcagagccagtaggtcccattctcatgttatgaccatagagccctatctgctaaaatgagtaaattttatggtatgtaaattataccttaaaatacctcatgacgttgtaaagaccatattgtgaacatcctttatgtcaggaactatatttgccatcatttcttaaaattcatattggaacgttttagacatacatagaagtagaaagaatgggtgatgccacccgtgagctcttcggaagtcaccatctgtggcctgtcacgtgtcatgtctctactccctcaattactttgaggcaagtcccagttactaatatattctttctcctgtaaatagtttagtgtaatgtcattatttttaaaatgattgcttactcttccatgcttgtatcgtactgggttaaaccagtggttgatagtgggtcacttgagttgactcttctgtatggccttgggggtgctgccacagacaccctgttagctggatctctcgagcagcggttgttagttgagctccgtggtctagaggaactctgtgttgtttgaggttgtgcagcacactttttttctttcattaaatgctttaaaatgtactctaagaaagaaaaaacattcaacaaaattgacagtattggccctcaaggcagtatttttaaattgtcaggagattttttatcagactcagatcttctggtgagaggaatttaggagggcttctgcacagagggacagaggcagtggcagagcattgcagccccccagaatggggtccccagggtgttggctgctccccctctccctgtgtgctgagctccctgtgtgcgggcctagcatccagcttgcagcgtggaccaagtggggtcctggtgccgtgggagccctgattgctggaggagcccagctggggccacaactagggcagcgagtgcagggtatggcgccccaggtggggtcagggggagtcagatggaggagcggtcggcccctttggttgagttttgaaggaatacaagtagatggtagatgaacggggaagttctgtgtagaaggttggaagtgtgaaatggcatgaaattaaaccactggttacttttgaggacagcttccttgttgacagatgtagaaacagagtctagggaagctttggcttgtctgaggccaccaaggtaattgtccagcgaccccagccaagagtaggggtgtccagctttccccaggctccgcaccctctgctgtgatccccatggggacctatttgcagccagccattttgtggcctgcgtttagcttcttgctgtccaggtgccctttaacttatgggagcatctgtcagagcccatttagaggtctctcttttccagatctgtggagcagttgagaggaggttattttgcagcatttgtttcttctaaatctcctttcaaaccacttttgaaagtgtttttttgttgttgttgttgttgtcgtggttttatgattgttttggggaaaaaccatgaaagaaaaaggaaataaatttttatttcaacatgaatcatagatatcacccttatttttccatcagttattgtagcggtatgtttttaaagtgcagcttactctattcagccttattgtccagtagttctacgtacagttaaaattaaaatttgaattcagcagaaatgaagtggatgtcagaggatgacacatattcaaaaagtccatccgtccttatcttgtcctaccctccactcccttcctcctttcacccttctcctctctgtcctctttctcccttcccttctttccatcttccccactcctgcccttgtaagtttgccatgagcccctagataacttaggtctatttccttgacatttttggaaattgctgaggtttactggagaccacttgaagccgtgccaactgcaaataataatcataataaaagtcacattatttttagaccttttgactttaccttcttctgactttccaattagaacagtaagttatagttagatcaacgattcatatatttaacaactgccaaaatcatttcctcaaaaagaggagaatcagagagttgggtttctagtatctcagaaagaatcatcatctcaaagatttgatgtaaaaagcttagctgttaacatataataatttgggctggcaaaatgcctaatatgaatgagtaatttagacctgtttataagcaaacctggcataaagctcatatttttaaatggcttgctaactttaaatggactgacataagcagtcattactataaatttgcccctgctgtgaattaacctataataaaacatacaataatttaaaatatgaaacaataaaatattttgccatgtgtgcttgaaggtatatattaaaacaagaatctaccagttgaagtgtatatatagagctttcctgagcacactcagttgttttttttttttttttttgtaaatttaagatctgttctttagaaattaataagaacagtctttttgtcacatatgttttctcttggctagatctgcatacagagagcaacagtttgttcttaagaaacagaatgtggcaatctttttagtattctgatcaaatagtactatgaagagaaaattatcaatgaaataaaaagtataaagagaaatatagtagattaaagtaaattagtggggacagatgccatggctcacatctgtaatcccatcaactttgagaggccaaagtagaaggatcacttgagccctggagttcaagaccagcctaggcaacacagtggtgagaccccatctctccaaaaaaaaaaaccaaaaaaacaaaaacaaacaaacaaaaaaaccaggcatggtggcatgcacctgtggtcccagctacttgggaggctgaggttggaggatcacttgagcttgggagtttgaggctacagttaactatgatcctgtcactgcactgcagcctgggcgacagagtgagacattgtcttaaaaagaaaaaaaaaggcaaattaatggtttaatggttaaaatgtgttatttatagtttgtagagtactcaggaaggatagaattataaacaggtggcatggacagcttccatccctataaggaccaacaggcgggtttctgaggaccagaaaaatttccagctcgcccaagtatgttgatttggtgcctgggctggtggctccctctgatgtcacaccccagtgcagctccccagggctcctctggaaccttcggggaactccagccaacttctgtgaaccttgtttccaccccaactctccctccagactcacatacctgctcaaacgtgcagatgctgctttcattgaacctcagatgtctcaggcatgtagggtgttttaaatttcagacacctaaaataaagtgtctgaagtttaaatgttaacctgtgccagtaaaaatagcagaagtgcctgaggaaggcctgtggtgggtgggtaagaattgttggcattattgaagaaaaaggaaagagctatgtccccccaatccccaaaatggagaacaaagcaaattaccctatcctgaccagtgtacatcaggtctactgattgattatagccaggaagttagggtttggcactttattgcttaattttttaatttacacattgaatttgctttgcatcaacttttgagaaagtggttctcatgacttatatttgtatagtactcatacttgttcatttattttctagcaatcaggagaccaaatagggtagcctgtactttcttcatgtttgcctgatgaaaacactgtacggttagttaagactcatggccggatctgatttgtaatttcttgtttctgaccaagaagagttcagttgctgttgaacaacacggacaaagtacactaggggaattcagagcaggtgtgaggttcttcctgctcctagaggtttgtgtgctctttacaaacaaccttgcaaacactgaggttgggagggaaacaagtctgctttgcacttagagcgcagaaggatttctttggttggaatgaaggagaaggaaagtacaatttttttcctgcttctcctccctcctcttttcttttcactcttcttcccctcttctctctcaaaagttatttctaaattatcaggttaatatatgtaaactaatattggtatatataaatgacactatactatattaatacataaatatataaaattatttataatatatgcactatatatatatattaacttgataattaactctagctgctagcagaggcgagcaggctactttcacatgcctgactcaccagttagatactaagctgatgcacaagttagctgtgcttgtttctaacccatttatgccaaggacacctttactatcaacatgtaatttaattaaatattttctgagtattttcagatatgagtgggaaaagtatttctataaaggctaaattgatttgggatgacttgttaaagatggtatgtttaaaataagctgtcacattaagcacaggagagaactgtaaagtcagggaaaattttgtaaacatctatgagcattctgaccttagtttctttcagagtgtgtctgtattctaactccagtttaataaggatgaatgccagaattggagtattagggtttattcaagtaagacaatgaagagcttctgtccagggattcatccttcattcacaaaaagaccatggtactggcccagggcaggagactgacagtgagggacggggctgttcaagtggcactcagcaatgtgcctgtattgagcgggaggatgaaagaaaaccatatttaatgtgtgctttctaatgactctctgctttaactgacttagttaaaaattatcttacctgactacaagtgatccccttgagaaagagagcttcatgcagtcaggcaagccgcagtcagggctgtcactgcttgagtttactgtcatgtgctcctgctggaaatcaatcagattccttattctttaaattacacacaggtggaaacctagagaagggctgggttgactggccatcttgaaggctgaaattggtggcatcagttgctctctgctaccctgacagatccataagccgtggtgttcatggttagagacagagcccttcaggccccaaggaagggtatgccatgggtcacctagggagggctgctggagaattcctctcttcacaggcagagaaccgaggctgtttgtccaagactcacagatgtttgaccacacactgaaaaactcagactccagtattgagaactcagtaggtgtttccttaccacctgttttctgaaaggatgcagggtcatctcagtttggaaatacaggttagtctgacaaacacacagttttttgcaaaggttaggggaaaaaaatctgttatttaaaatctaccggatgttattagcatctaccgtagctcaccacaaagtttgaaagaacatagcagaatgggtgcagacctattatgatacaaatcagaaatcaatttcattgttacttcagtttacctaattattttttaatggatgaatgaaaccgagtgttatatttcactttgatgatacaggacctcattgatttgtctgtgacatcagtcagtgtacgtgtgtagacaagtgtgtgttctatttatttctgacaaaggtgaaataaacaccttaggtaatgaaacatcctaccttaagtcatttgaactcattgatttcaaatcagtagttatgatgttattttttccttttacagtttaaaaaaattgtgttgaatgaagtgcctttaaaaacttgacttggaggaagaaagtaaaatgatgagaaatttattttgtatgaaaagtaaatcttttctgtatttggtgtttaccatgtgtaatttaaaaaggaggctagactgtctagttcaataataagaatggagaaatgaatttagaccaaaaaaagcagcctagatttcctctacttctgtactgataaagatgatttggagcttatcttcttcacaactgttttaggtgaaagaaaaagaaaaccataacaaacctaactaaaagcatgcatcgttttttatatgatgctaattaagagatggttgaattgtggcagttgcttctactacatttctttcacaaacgttcttttgtagtgactttgttattcgtgtctgccaatgcacactgttagtgtttattggtgtataatgacaaaccttgattgtgatctggaaacctatcacagttttattatgattttacatcttattagtgaatatgctagtgataaaaacttgatttttttccttcagctttctttattcagaccaaccttcttttatatatggccttgagaacttctgcaaactttggtttttcatccataaaatggctttagactaaatgattccttaagtttctttagttccaagatttgatgattccacaaagtttgagatcttttagcgccaagatctaatgattccacgaaatgtgagatcttttagctccaagatccagtgattccatgaagtgtgagatcttgcttgtatgtacaaatctatttgcaatttctccaatggcgtgggttaagttctactactccaaagtgcctaaaaatcgagaaaccataaaactagtttttgttcttctaaatagacaactgaattttgacaatagaagctagttttgagagtcggtgacttatttatgttgatttggttattttaaaaattttctttagcgattaagaactcgtgttctggaatcaaatttgaattccatcccctccacttaatcaagccgtttgatcttagccatgctgcttgccttctctgtgcgttagtttccttgtctgtaaattagaggtaatcatggtatctacttcttagcgttcttgtgaggattcagtgagataatccatgcaaagcttggctcacagcaagagcttaacaagggttgactcctcagattgtgatggggactcatccttttcatgatagtagcaagcctgcacagacgtctttccttccataagttcaagagttctttgagtctgcccatagcactagctttttgatctggaaatgctgcagattctgttttctcttaggtagtttatgaatgggtttggctgtattagagttgaatttgtctcagagccagccatagaattcacacttgtccaacaattgttgttagttttgcctgcccatttatgtatacacctatttgaaaaaagatgtggtgtttcaaacaacaaggtggtttttctcttcttgtttgtatttgcttcaccttcttggattgttggagttggtgttgcatgtccaatcattccaaaagagctgaatggtcattgagttgattgtgtcttagaaataacttgtggtctgttctcataatactgacatcaaggtgtcgtatttcagtgcataccataaacatctgtacagtggattggagtcctacctcttggtttttaaagactctgtgtatcgtattattgccaatgtcattccatttggcatgtgccaggatggtagcagtattataaaagcatgtttatagtttaacatgattcagtgattccagggaaactgcctccaagggtcctgaacctggtcagtacagttgtttttactgttttccatgactggcctatttgccttggtgcatcaaatccttgtaatagcttcatatggtagatagccagaccaaggtctcatcgttaggaaggggagctgacattggaatctagcagcctggccagagccaggctcttaactgctatgccacctcttagaaatctcctacagggcaaggaggcgtgctgggaacagcccagcttaagacggcagggccaagtggtctggtatgtgagcagaggcccagatcatgcattcctcctccagcacgatgccccatgcgtcaccgagttctctgatcaccggtcttttacatacttcattcctcccattgtttactaaaggatgtttgttactaagcatacctggagccaggaatgaacaaaacaacagaacctacagtgtcctgagagccactgtacagaatgtggtcattatacgcaggccattcaggttgactctctgaggtgtcctaactctgtcctgttaaaccattaccaggagagttcacagaaaggaaatgctatccctacacctgcagcttctttctgggcccctttcttgccctcagtcctggcactagtccccaggagagtgagagttgttgcattgaaatgaccataaagcttttcttctccctcgtgctgtcccccacgaacccaggtatgaagtatacagaaggtggggaattaggattctggggctttcccatgccagccacgacagctgcagcctgctcagtcacaggcacactcagttattaaaattagatttctgatttataggaagattgtcttgatcaatgatgacaagggcatacctgactaaattaatgagaaaatggctagggtaagtcctgggcagctatgtgaatgtgagtatcattctagaagtgtgtgtggcacttgctgcagccctgtgtggctgtcctggcactttgttcccggtgtcagggcctctggtgtgtgattgtcgcagcacgtgtggggcagtgtgtgtgggcattcccagcctgacacatggcttgcataaagattgcataaggttataggaaagtgtctctgtcttttacaccgtattgccagtactaatcagtccaaagtttgagaaaatagtaaaagaataacatacatggttgaaatcaagcatttaaaaacattcagtaactttttgaaagaagactctgcttttctgattaaataaataaaagtcttattaatgatttttagtataactatagttcatgtgtgtgttggggggagagtctcgtttaccttcccaaaacaggttggattttaaaatgcaacttttgcaaagtaagtaagtttcagcacaagggcatgttttcatctctgcactttgtcatctgtgtcagtaagcagttaagtggcacagacctgcctggaccccctttggcaggttgttaggatgaattagtgaagtcgtcggtttaaagagcttagggtggtgcctggacagagtgagtgtctaatgattgctaaagtaattttcttagttttactatggaatcataataacccacatagaagactgatattaagagcacagaagaaatagtcccaatgtttatgtcatttaatttgaaaaatttcttaacttttccaacaattagcatctaaggacctgagctgagtctctaagagtcaactctgctgtgaaattgatgttgaaatacaaacaaaacaaaaaaacctcaaaacccaacaacataataagagtagtttgtaactgaaaagaaagtctcaggcaagtcttaaggagcaggtgggccctgggcgaggctgcgcagtggggctggagcaggggcccctccccacagagctgtggcttctgtggttcctgtgcacctcacaagaagcccagtggggcaggtgagggtcgcacagcctgtgcagccagggctatacccggctgctgtgggggttccgcggccactgccctcctgcattagatggggcaccaattcctggttgaaacatggcagatgacaatttccaaaggctgtgaactttccaatagcagtaaactcctctgaagaggactgggatgtggaagtgggatccctgtgccgctggcagtgccggcagcaacccttctccggctcttactgagctagggaagctgttgctctgcgccttcttgtttagtttacaagatttaggacaagtgcctcggtttctgatgctgtcagagacttggtcaaggtgaaatctggtagctcagtttatagaactatgacaaggctagtgtggtggtgtgacattggtgaatgtttgtgagatggaaaagtactactagactttagcagagccagtggcataagaaacttaagtttaaggccaagtgctttgtgtgtgtatgtgaagtggagagggaggaggatgatttgctttctttttctataattttttttttttgtttactctgcaaaagcctgaccagatcattgttttccttaccccccgcccacagtggagtaggagaactccatttagatccttgccctgtacttctgcctctgcaaaccttgctttccttgttgaaaatactcagagagtctttgtgtcctatttcagtgctgaaaaaagatctgctgctttctaaagtgtgcctgtcttaccaacccgtgtgggaatgctgcccgcgtgtttggatggctctatcaaagccttaggctgtttctggccggagtcataggggacccttcaggtttgtggattcccagttttagtacagtgtctttaccaccaatcccgtattaataggacagtactgcgggtggcaacctgggccgggtcttctgctgtgatgaggaatcacctgcattagtgtcacctggaatacctgtgaaaacgcagaatcctcagcaccagctgaggcatcagaatctttgggatagggttcagggttcacttttactccaggatctttacctgaggactaacattaaagaaccatttctggaggaggtaaaatagatcagtatttttcaagcagcatgtggcgtccagcagttttttttttttaaactaaaagatgccctaaaatagtacagaaatatcagagttcattgcacatatcaagagtgattttgtgagtctctaaagtcagtatatataacacaagtgttcatgtacaggcatttttttttttttttgcactttgttctattgtacagatactgcggggtttttttttcttcttcctcttcttcttctttttttttttttttaaaaacaaattgaaggtttctggcaaccctgtgttgagtaagtgtatccatgacatttttccaacagcatgtccttgctttgtatctctgtatcaaattttggtaattctcacagtatttcaaacattttcattgttacatgttatggtgatctctggtcagtgatctttgatgtttttagcgtaattgttttgcagcagtatggaccacacctgtatatggtggcaaacttaatcagtaagtgtgtgtgttctgactgctccattgaccagctgttaccccgcctctctccctctcctcaggcctcctatttttgagacacaacgatattgaaattaggccagttaataaatccaactatggcctctaagtgttcaagtgaaagtaacgtttgcacatctctcatgttaaatcaaaagctagaaatgattaaacctagtgaagaaggcatgttgaaagctgagacaggccaaaagctaggcctcttgtgccaaacagccaagttgtgaatgtgaaggaaattaaaagtgctactccagtgaacacacaaatgataagaaatcaaaacagcctattgctgacatgcagaaagttttagtggtctggatagaagatctagccagccacagcattccctttagacaaagcctaatccagaacaaggcctcagcaaattctgatagaggtgaggaagctgcagaagaaaagttggaagctagcagaggttaaatcctgagattgaaggaaggaagccatctccataacaaaagtgcaggatgaagcagcaactgctgatgtggaagctgcagcaagttctccagaagaccttcctaagatcagattttcagtgtaggcaaaacagccttctattggaagaagatgccatctaggactttcacagctagagaggagaaatcaacatctggttttaaaacttcagaggacaggcgactttcttgttgggggctaatgcagctggggactttgttgaagccaatgctcattgaccattctgaaattgctagataccttaagaattatgctgaatctactctgcctatgttctgtacatggaacaacaaagcctggatgatagcccatctgttgacagcatggtttactgttttaagccctctcttgagacctattgctcaggaaaaaagatttttttttcccaaaatactgatgctcattgacaatacacctagtcacccaagagctcttgtgtagatgtataagaagattaatgttggtttcatgccggctaacacaacatccgtactgcagcccatggatcaaaaactaattttgacttccaagtcttatcatttacaaaatacattttgtaaggctgtagctgccatagatagtgattcctctggtagatctggacacagtacactggaaaccttctggaaaggtcaccattctagatgtcatgaggaacatttgtgattcatgggaggaggtcaaaatagcataaacaggagttctgaagaaggtgattccagtctcgtggatgacttcgaagggttcagcacttcagtggaagaagtaactacaaatatggtggaaacggcaagagaactagagctacaagtggagcctgaagatgggactgaattactgcagtctcgtgattaaactcctcagggatgaagcgttgcttctcatgaatgagcaaagaaagtggttttttgagatggaatctacacttggtgaagatgctgtgaacttggttgaagtgacaacaaaggatttccaatgtgccacaaacttagttgataaagcagcagcaggggttgagaagcttgactctaatttcgaaagaagttctgctgtggataaaatgctgtcaaacagcatcacatgctacagagaagtttttcatcacaggaagagtcgatagatgcagctgcatcactgtcttattttaagaaattgccgcagccaccccagccttcaagcagccaccaccctgagcagtcagcagccatccacatcgcggcaagaccctccaccagcaaaaagattacgactctctgaaggctcagatgatgttagcactttttcttttcttttttttttttttagcaataaagtatttttaaattaaggtgtgttcatttttaaagacaaatactaccacacatttaataaactacagtataggataaatgtaccatgtaacgtatagtgtaaacataatttttatatgcactaggaaaccaagaaagttgtgtgactcgctttattgcagttgtctggaaccaaacccacaagcatattgagttgtattgtaaaaggtatttcttaatgtgggttaaggtcacaaaagtttgaaacccagtaggttagatgatgtcttagttccctttcatcgcaacctcattttgtattgttttgaatccttagctcagacccccagccagtaaatcatctgctctgagacaaacactaagaataaaagaagctgggaagcttttaacctgacctaagcattgtcttggaaacagtaaaatgcagccccttccagacctcttttctcagtatctttggggcggggctttggaacctgcattttgagtaactgttccacaggattctgatgcaggtgtttatgggaccaccttttaagaaatacatgtgaagttttaaaccttgtaacaattctctgaggggcacctcctctccctcccacttttccctgtttccaggtaagaatcctgaagccccagttgatcagacttggtgacttctaacatcgcagagatgttaaggcgcgggcttggtagggcagcacgaggctgccgttcctcttgcccttcctacttggagagaatcagatggcgtgcagtgtggacatgtaagttcctgattgagggcgtctcccggatcaaaaataaataggattgttgaaaatgatagtgttggaatcctgggcatgaagccttttgtctctgggatagcctttgagacctcctccttccatgagtgcagctgacacagaggcaggtaagaggacaggtagccgtgtctgctgcttatgagttgtcccagctctgccccagctttggaatcttgggcagtggcagagagttatgtgacagcgtctatccctgagagttcttccagattttaaattctatgattctatcttttggaaaaatagtatttcctgtttcttaccttgacagagatactgaatgggtcgacaaaaatgtatgcacgtcttttgagttcccccagaaaaacgatgtaaacagaatcattcgttggcaccctgcagttcagttcagattttgtgtgggacacagcagatctcagcgtgcactttgagagctcctccaggagcaggctctccttccccataggaggctggtgtaagttgcatcacagccatgtcctctgtgtcctattcaccaaggcaagcattgggaacagggcggtggagcaactagcctaggtgaccctgcttggcttcaagttaatcttattacgtaaagaaacagagaaggatttactttcaaaaccccttctgatggtgtgtaggtgggaagccacatccagtgagatttgcgagaacaagaggaaatggccaagtttccgggaagcagggctgcggtgtgcagctgtgcattctgtggccctaaacaggcactttgtttttcatttgaaggtcatcatctccctttggcacatgtgcttcctctctttgtaaatgtgtaatattttaggctcaaattcctatcgaattttagtcttaatctaagtcggattatagaggtacatattgtcttactgttacattttactgatattcagtgtttgatatccccaaagtcttgacttggattcacaagtgattacatttgttatgcttgtcttgatatccaggaagtacatagttagagacagaacccacatttggcctgaaaatagtattaataaaagtaaatgtttttcaagcagagattgcagccatagtttttgatatatgctaccaaatcatgttttattttgagaattttatgtttaattttatttaatgttacagtgtttatccatttttcatttcttgattcttttaatggaagaacacattattattatattattattattttgtttgttttcagaaagtatgtgaagcgaggaccctacctcatctgcaggttaatcttatacatactgtttaagtagaaattcctgcatttgtcttttaaaaataatttttaataattttaattaaattctaaaatagtttacaatataagttataagctgttttcaaatttaggttactcttggagtaaggaagaactcttagctgagaagatgtagttaagtctgaggttctcggtgagcacagaattaagtgaagaaagaatatactaaaagattcactgaaggtgacatagtctgtaatattagcaccatcttagacacttactttgtatatattttaaagcatggagactagcttgggaaggctggatggttgtttgctttcatgaatgagttacgagggatagtcctaagttgcttgcaggcatccaaaacaaatgttagtaaataaagctttacagaagaggcaaagtggaaggactcagtggctaaaatatagttcagttgccagaaatgattgtcgttagttgtttttggaggacttaaccctaatggatctaggcatggaagttgaattatagacatgagagaataacgaagaactgagaaacaggacataccaccaatttttaaatgaaagggcaaaaagtaggataccagaatgcataggttaagatatgtgacattatgttaaatacgcaataggtgtttttagtatcacatgtaaaaattaaaggctgtttggtctttgaatacttcacctccctgagccttcgttccttgttcctgagaatgaaaggggtcgcactacctcatgtctgatgtagaactcctgagcagtttctgttattttgggaagcctgatggagatggtgtgctccttgtgacaggaccctacagccctagagcatagccttccctcaagtttatctgaatcgtagagaatcagtgtagagttattggctgtaacacgctgatcagaaacattaattgtctgttttatggattggggtgaggtgagaggtgcagacaggagggaggagatttggtatacttctgagaaaaaaagtaaaaagcaggtggagttaaatctgtggaacccgaaaataatctaggtgcttatgttatttttgcctaacaaattaccacaaacatagcagcttgaaacactcatttcttactccaccgtttctgtaggtcaggtgtctgggtagttggattctctgttcagggtctcacaaggccattgggactgcatttccatctgaagcttggggtcctgttcaggtccattcagggtgttggcagaatccacttcactgtggttgtaggactgaggtcccagggttcttgctggctgttggcaggggtcactctttcctggaggccactctcaggtccttgccacacggcctgctgcaccctatggcagtttgctcttctgaggccagaaggtcatctctctgacactgcacctgcttttaaaggcttcccttgatgagtcaggcccaccagggaagtctcccttttgatgaacacagagtcagctcattagtaacctaatcacaggcatgctatcccatcatattcactgctcccacccccccccccacctccaagcccaaaaggatgatacaaggggcataacaacgggggtgggcagatgtcctagggctatctaagaattctgcctgccactgtgttagatacttgcaggttgaactaatgaatgaaagcaagggaggaaggaaagaaagggaaataaattaaaagtcagctttgagttccgccgtggcagggctgatgcttcctgctcctttccttcctgcttcctgtgcatttgactgagtgagggtgggaggttggagggaccataagtgacttcagggaggcacctggttaatgccggagctcacacaggagaggcaaggaggtgggctgagcatacacagtgcagatgagatgggctcctcctgatgggtgggtcttcatgggaccagcatggaagattccagtcctcccacttaggttatttgatgatgatgatgatgttgatgttcccaactgcctgtctgattggtgtcaccaggttagaaggagggaacttcaagtccttttttctgtagaaccccacagccttgcaagccctgctagcgcagctgtgtttttagaagaccttgtggaggttgaaaaccagggtgttgccagtttcatgcagctttctggttgtgaacaagacttaccctgagagtggagtggagcgtggacgacaaacagaataattttacttacggagcctcaagttttagtaaaccaggaatctgaacattctttttgaaactaagggtagctagatagaagggtttttataaaagtagttttcttttgcacaatattgttttattccaaattatgcatttataagaggctgtaagacatggaatttctaataatcacaacgttatagtttaacattgtccctgaagcttggtgaagcattacgtcttcacttatgtgactaacctgtttagtcaattgccttgctaacccagcaccctgaaaggctccaccctgaagtggaggtgctgggtagagtgtttccatatcttcccagggttcggagacgtggagggcacaagtggccgatggccgggaagtcagaagaaggggaggaaagtggtttctgcagctctcctcctccctggtttctgcagctctcctccctggcttttgcattgccctgtgcttaaagtaggagtccaggagggaggaacacaatctgaagacaagcgtcctccaaacagggaaaaacatcataggaaagcttttcataaactcacaactgctgggacatggagagttgaggcacatgagacagctttggggaaaacatgcggaaataggaaacgctgtgttatcttaacaactcagtttgtcagccaggtttgtcttgttccgcacccgcagtccttgaggtatttcaagcatttggtcattctacccttgatggccttcaggaagtgcacagatgccagccgttgtatcacaaatgctaagggacctcactccaaggccaccacttggaaggttaaaatgaggatattttctatcagtcatagcaggaagagaaagtggaaaaactcgacgtttgtgataaaggacagggacctccttttgtgcgtgggaaattgaatccttgggtagcttgttggttacagtgtaactctagacttctgatggaccacctcatttgtggttgtcatactgacgatcagttttactaagtggcatactccagttttttatttaatgcagtctgctggggagtactttcttagttatctattgtgttctcagaactttgttcctctaagatttgtaggacatggcaaataaaagataccaccctttgaggaatttggttaggaaggaagacgtgagtttaggagacacatgtagagccccagagtgtttttcactaagtacaagtaggcagattatgttgtattagatatgatgcaattgcatcgggagggtttaagtaatctgatacggactcttaactcttaggttgtttactaatttagatataaaatttagggaaacaactttagcattgttctttagtctcaatggaaaggttatggtataagaatgttagcttttcagtgtaatgaaaaagtctcttatgagtaaaattagaatctagttttgctaatatcatacttgttgtatatttgatattcacagtgaggacagctcatcattaatgcttagccaagtattccattaatagatgcctatgagcatttgtatctgagcttttggggggattcagagggagggtgtgggggcctgtgtggagaggaggccagggagctgggcctgttcagggtttctcatgtccgatttcctagtagaggaaactgtacctccatctccaataaaggaaaaaagaaaaacaggtttgtttttattactgcctggttaggcttgggggaaatgatatttgtgtattttaatgcagtgttccacacctggagctccaattctgatgtgttttatggggcacagaatggacagaaatcaattcctggtacctgtgacaaagaaaaaaccatccagaattggagactgttccctgccgggggaacagccgcaaacatgtgagcctgtggttgacaaaagtacgtcatgcatttcagagtgcgtattaggaatcagaggacaaatggcttgagaatgtcacacagaaagtgcatagcataactgcagcagcacatgactgaatttcctgggcgcaaaagctgttgaggactgaaagtcactcagtagcccatctcgtgttttggatgcaattctttgaacttttagagtagcagattccatcagggaggccacatgtggatttaagcagataatttgtataggcacaaatcatatcattttgactaagttttttggaatgaaattgatatctgctttatcaccacttgtacttattggactattttggctttttagaaccttacttgttagaaaaaaaggctttctgttattaaggttgtttgaataggctgaagcaggagaatcgcttgaacccgagaggcggaggttgcagtgagccgagatcatgccactgcactccagcctgggtgacagagtgagactccatctcaaaaaaaaagaaaagaaaaaagaatataccaaattataattcatagagtcaagccatcctgatctcaggctgtgataaacaaaattaggcagagaattttaggtatgtgttcataaaatgaaagagactaaaatttaggagtatttattgaagctcagactatcctgcttatctcaaacatccctcatagtatttacatttgtaatattgattatgatatatatagatttatttaaaattaaaaataggtttaagatacaactaaaacacaccagggtatgtctgatctagaacaggagttgtctgttcataccctgatctagaacagggtatgtctgatctagaacaggctattaactttctgtaaatagccggataaatactttagtctctatctcagctactgagctctgcagttgtagtgggatggtggccacctagtagcatggacacagtacacataagatggcatggctgccttccagtgaaacttcatttacaaatgctgacagaggagagttggcctgcaggccctcctttgccacctgcagtactgttgtaaggcctggaggagaggggatcttttttctgtactactagtcagtgaaactgttaaacatgagcagtctctagaatctgtcctaggagtttaatttagagttggtgttatgtaatttgaccatttggaatagcccaggtaataatgccttttttgataggtttccctgtaccattaggaagacaacgttcaaggctgggtccaggtggttcttctctttggtgatagcagtgttgactctgttggaccaagctcccctatttatgatacattgtgtaacgctcattgtagtgtcctgaagtgtgattaacacatgctgaaaacacgaaaatagcgctttaactcacaaagaagaaatgaaaggaaatatcatttataaatacttatttaaatgtaggaatgcttaggtatgactgctaaaacagtggtaccgaaatgcaggtctgctatgagaatgtcatctctaaaccactcaacagctgccttctttgagtcagtcttgctgtgaaaaaagaaagaggtgcaaactccttctctaagcaccaggagatcctaatgaaggacttgtgaccagtctgcagatcacactttgaactccagaagttgtaacgtttgccagcgcttgcacgtagaatccccctgcacgggaggtccttagaggggtcctattggcaactcatatattatgagccactttgccactggtgacatgattttctgaagaggtggacagtttttggtacacttccaaactgaagtagagatttcctccacttatgtgatagttcctctcctgaaaaatattgtgtataaaacctgtgcccaaaaatgggtgaaatggagttgggtctatgctcaggatttttacttactggagaatgtctggaaattggaaagtcaggcaagatgtttgtgtgtgtgtgtgtgtgtgtgtgtgtgtgtgtgttgggtgatgaggggaggctgtcacacacaatgtctgtcccccatcattgtgacaactgcagatacccccacagatttccaaatataaaatgaaacaaaggagcatgcaggtgaggatctggggagagtggttacatgtggggatcatactttcctgtgctctcatagtgcagaggaaccgcagagggatgataaaagcagctgaactctctcctgtgcttcctcagaatttctgacttgttttccatgaatgtcttctcatatacatatatattcatttcttcctttttgcccccctcccctaatacggccccattttatttggtcatttctcctttgtatcattctctagggtaaattttctcatcttgctgtttcaagatattggtgagtcttaatcgttttgtaaggtgtgttgaaaataatttataccaattgtaattaaagcactggaaatgtgtagtgtactgtttctaatatcacttacttgcttattgattgttttttgagctggaaagtgatggagttatggcccctgcacatcttacttctgcgaatggggctactgttagtacctttcacataggggtgttggaggattaaatttgcaagttagtgcctgctgattacttgccaatgcctagttcttgtgtttagttctttaaatggtagacattacaaagacaggaaaaagaattcttgtctttgtttgctcttttaacaatccaaaggtttaggaatttactttgctctaacaaccctctcgatcctcttgtgaccccgttatactcagtgttgctgaaaaagtccattttaaaataatggcacctaccacatccatttttccgtctttaggccagaccctctgatggttggtggattttagtattaaagcttgtgttgaaagtggagggggtgttactactgttgtgtctgaaacaagagttaaggttatattttatgaagcagttttggctttttcaacagatgttggccactcacttttatggatttcacattgagtagtaatgagtcataatcactacttaattttcccaaaccagagggaatatacattttattattggaccctccaggctgtcaatgaagagagaaaacctttctttggaatcaagttgaaaacctgttgttaacacctctctctgggccttctttgctctccttagcacgttcattgctaggggctgccacttccatcttctctgccttggaagcatagagtcgtttctcagcctcattctcacctttatgagttcatttaataatgtgattagaacatataaagtatgcaagaataaaatgtgtcatgatgaccttaaaacttttattattcaaagttatagaaagttacgtattttattgtagactcataataggtgaacctttctgatcttggggatttcttgtatttccttggagagtcttacataggcataagccagtgactgattttttttttttttttgattgttttctcatactatcataggccatttgaggggaataaaacaaatactcgttgggaatctatatgtagaagatcattcaggcaaagattctggtcttaaaggtgttaaagtctactggagaacataaggacttaattataacagcagccacagcctccaccagcccctgtgataaaagcatactatgttatctcacttaatctttatgacagcccatggagggtaggtctcattatcttcatttttaatgctggagactgaagatgagagacctgtggttgcctaaggtcatatagctggtaggggcagagtttgtgtttttgccactgttcttgatagcatatttctgccatatgggggcttctcccggttccgtgagtgaggcatgccctcctgccatagcctccgttccttctgccttcaatgaatacaccttccataccactccccccaacccctcccattaaattctaatcatcatttaagtttcatctttggtggtcttaggtgtcactgttgcagacaggcatttttctggcccctgcaccagcttacagcacccccactccttgacctctataacgctcagctttatacttggttacgtttatggtgtttgttgctctgtttgtctggtgtcctggactctaagctccgcaagggcaggaattgtctggcatcattgctgcacatgacacctggtggatgtacatatttattaaatgaataaatgaatggatgttcatacttttgtccaccatgttttatgctaaatacacacagagtagataatgagagaggctctaatagcgaggtgtgtatcctttgagctatggatgacaaacttaaaaaattgcccattaagttagaaaagaattgagtatatctttttaatatatgtgtttacttaatgtacacgcatattgtaaaaatacatgatattggcattttaaaaaggatgaaaatatttaaaacaaggagtttctaatatgtttttctgtatgttagaggaccagctggtatccaggacccactaaacttggagctgggggtgccagggcaggccctgtgggaatacatgtaactaaacaagctccatggccacagtggaaccagactgcagttgatcaaagcatggttgagggtgggaagtgctgggctcatgcgagggtgtgtgagtgattgtgcatcaacatgaaggatcactgggggagtggtggggtgtaaggttcattggaagtctgggactcagctatgattgaggtcagatacctagttcaggggataagaccatatcatcttgaaatgatgggctgctgaagggtcttaaagaatcatgggtacagtggctcacggttttaatcccagcacttcgggaagccaaggcaagtggatcacttgagcccaggagttcgagaccagcctaggcaacatggcgagacctcgtctcttaaaaaaaaaaaaaaaaaaaaaaaattagcccggtgtggtggtgtgtgtctgtagtcccagctacttgggaggctgaagtgggaggactgcttgagcctgggaggcagaggttgcagtgagctaatatggcaccactgcattccagcctgggtgacagaatgagactctctgtcaaaagaaaaaaaaaggaatcatgtaactgtcctcccttctcctttagtaaatatttttccttcctttcttccttctcttattattatcttattaatacataccaaaacatgtatctcttattatttcacagtggcacactgaatctaaagtgatcctcctgcctcagcctcctacaggcatgggattccgggcatgcaccaccacgcctggctaattaaaaatatttttttgtagatatgagatctccctatgttgcccaggctattttttgttttgttttggttttgtgttttttgtttgtgtgttttgttttttgtttgttttgagtctcactttgtcacccagattagagtggagtagcacaattagagctcactgcagacttgaaatcctgggttcaagtgattctttcacctcagcctcctgagtagctgggattgcaggtgcataccaccacaaccagctaattaaaatttttgtatgtgtgtgtggagacagggtgtcactgtttcccaggctagtctcaaactcctggcctcaagtgatcctctcactcaggcctcccaaggtgctgagataggcatgagccaccatgtctggccttggttaagcttttttatcctataccagagacgtctaaaatatttacttcttgtcattattattgccaatgaggttcctgtacaaagacgatgttgactactttaggcccatagggagatagtggtagtttcagaggtagaatgaatggcagaggataaaaaagtacagttcagtggtgatagttggacaagctgggcagtggataggggtgccgggcagtagagaccttagaagcttgtggcaagaccagtgagttgaggaaatgctcctgcttttgctaatctgtgggtggggtggtagctgccctggcatttttaacattccctgttgttgagagatgggctaataatgctagtcagaagtctgatgtttgccggaggtagccccgtgagcaggttttgcaatctcagtagatacctgtgtgagggaaggtttacaccacaattgagttgggggaaatgttctgtgatctgtacttacagaagcaatattaaaaaattcatatttggtgtagtaaaggaataaaatagtgaaaattgtttctgttcctacatatacaagtaaagggaagccttgtaatgctttaatgattgcggattgtgatgcaaaatgtattagcctatttcacagaagcaaatatgtcaattaattaagagaaatgcctaaattgccacgtcagatcatttcacagaggtgtggaacatttaaaaagtactttatttgcaaaaagttctgaaatgacttattttaaaattttcatctaatctacaaaactagattattttcaaggaatgtctttagtccggaatgttaagaaaaaattgttttaagttaaaatgtattattttttcttttaaaatgttattttatttaaaaagtatataacaggtgttctactttgccctaaattatagtccagtaatttggaaattttgatctaaatattaacagaagctttaagaacatttgttctctttgaggaaaccctgacttagggaattaagagaaaaaatgccatctgtagaaaacaaaccaaagtaaaaacttgttaccctacccatcctggcataacttactcaaaatataagggaaacctaggaagtgtattttgctatttatgaaatatttcttttcagatttttttaatacttcagaagtatattctaagcattataatagtcaacttcattaatacaaactaatgtaaattccagaaataaagttaatgagatccaaacaaaaatttaggctctgggttgagtacagtaaatagcatgaagtcagaagacctgggtttgatgattgcttcctggctgtattttctctagtaagtcttctagtttcatgtttgacactggagtctctggtttctaaagtgtagacaataaatatgtctgtcatacaggatgggtttaggcatgaagtgagttaataaggcttgggaaaatagtttgaaaactgcaaaggtctatataaaatgtttgttgttacagttacaactactagcttttaatggtagaattttggttgttctgctaggtctgcggtggttgaattggacacagaatggaactacgctagacagatgagatctagggtgcccttacacccattcgaatccacaagcatgcatttgggaaacagttcatgggaaagttgtcacaagtttatggataggggatataggctttttgtggtttcactgataaaactgtacattttaatttttaattaaaaaaaattttttttattagagttggggtctcactgtgttgaccaggctggtctcgaactcctggcctcaagcaatctccttccattttggcctcccaaagtgcctggattacaggtgtgagccaccatgccccagccctataaaactgtacattttcgatgatacataaaacttataattgtagattcaagcaactcacatagttggttaaatagatcacctacttaacaaataatttgtggtagaaaccaagcttgtgttactgcactgttgatttctcagagtgaaagtccaaacgacctggaattgtggtttggcctgtgaggatgcagtaaaataaagcctccccaccccacccccagaacatcagaggtccccagaaaggaaaaatatgattaacggtattttcttcaaatgtgttaaaaattttagtgttttcattttttctatacagtgataaaaacattttatgaaaaaattgtcctgattattaaatcttaaatgttcctttttcagggcttagtcttacagtaaactacttgccatactgaaggtaatgaatacttaaataactatctttcttctcagtacaccaaacgtaactcttgggttcagaaatgatttacttaggatatatgcacttatttttctagaggagtacttcaccaaggtattaaacattgttaccattttagttactattgtatataccaaaactttgtgtggttttaggagagaagaagtaatcataccttatctacccaaaatggtttctccctcattcaatatatatgttttaaataaccaattactcttttgtgtggaatgtcttagtataataacatttccaaataacctgttttgtgtagcagctttattgaagtataattcatatagcatacaatttccccatttaagatatacagttctgtggcttttagtatattcacctacagagttgtgcagccatcatcgccagaaagaaaccccacagcccttacccttcacccctccagcctccccattccttccagtcccaagcaactaccaggtgactttctgtctcagtggctttgcctatgaaacaacctgtttttataacctgagagaggtatccacagggaagcttctcagcctctcctgttacactctgtgataacctggtgcacctttgtaagccgctgagagaggaatgggacctgcctgcttgtcagcattagagagttattctcccctttaaaggaagcaggagttattttgctttggtagtacaggttgagtatcacttatccaaaatgcttgggaccagaggggttgtgaatttccggtttttcttttagattttctttcagattttgaaatatgtgcaaatactccctgttgagtatcccagatctgaacatcagaaatctgaaatgcttcagtgaatattttctcttaagtgtcctgtcggcactcaaaatatttcagactttggagcattttagattttggacttttggatttgggacattcaacatgtaacttggtgttaatgcgattgtcagtacagtgatgaagaaatacaggggacagtgatattgtggggctgttgtgagtgtcgtgtgatggggcccgtaagaaatggcttgcatgttgccttgaacaccagagaatccggattcgtgaaggcaggatgacttggcatgtgtgtctgcttgctttggtggcacgctggagatgtttgggcacatgtgtcgtgcgcacacctgctgcggacagcagttgttgggtggaaatcaacagttgtagccttgacacagatggaagtgaatgtgaatacaattgaatatgaggcataaaaccctctacattgatcagcatggtgtttaaaatgccttaacgcccaggctcagccactttctctacctctaagtagatcttttgattgatagattcttagttcgccaataatattgatcaggctttgatagctaggttttgaaaagagaaacggttaccagctgagcccaaaactgcttgcttggttttaatttggaggttgctactatttgaggtagaattcatgactcatcaaattttcttctttcctctaacatttagcattattactctttgttggacaaatttaccttaagaatgttattctgagcagcttgtagtcactgcccatatcctgcctgttatccaccagaacatgtaggaattttcctttttactttttgtgaatttaagtgattataatatttagatgaagttagagatagtgaactttatacatgagaaagtaaagtttatgtcagttctctcgaaacagtgtacgtgtagttgattttagtaggaataaaagttagaaaaatgcacagagattttgttcttggagggatagggtcctggaggtgaactgactactgcatgctgggagggacttcctgcagctaagtgaagagaagcattccattgttttctttgatgctgatttgaatgtggtcattaatttgctcattattttaaaacatttatactgtcagtgctagggttttttccctcctgcatggtatggtgttaagtaaactcgaagccaagtatctgctgtcccatctttgtgccagagcattcgcagcctccagggctccaccagcccatgtgggccctcctgggtccctgtgggccccgtgcaccacctgtcatggattcctgccgctggtgcatgggacacccgaggagataaggggtatgaatctttcttctttatgttccatgcacatttaatagcagacgatattaaagagaattcagtgttaatgtaacttttcatatttcatctttttttctttaaataattcataaagtgctactttaagttaaaatcttacaatgtaggatcctattggatggttctttttaaagagaaaagtttggaaaggccctggtggggggtgcaactaaaatgttttccacttggtcttaaagagtgttgtgcagagctaagatgaacctgatttacatcccacatctttgccacctggctggctgccttgttaactgtgcaggttaattaatccttgcaaatctccattttctcatggaaaataagtataaaaacaggtacttcgtaggattaagggagatgccagcttgtatcactgcagtgaatggtgacgccgatgaggcttgtgctgttggacttatttttccatacacgatggtaagaggtgacgtataacctaagattgttggctctaggcttgagatgtgcccagggtgttttttatatgtagtcaacagagttcagaatattgaaaaattcaaatattaaaataccaggaataatttcagaatatataagtggtattctgacctgttatgctaaaatacttctttttgataggaagtctaaaaattatttctatcctagttagcagtaaggactcaacctcccctcccccccattcttagttcttatgtaagcgttcttgaaaatgtagttattcttccttctatacttagttgaaatgtatagaataagaattaaatgcagtgaatcaaatctgcagtgccagctttcttgtttccttggtgtctctactaacagaaatacgcaagcacagcaacatgggagaaatagcgttcatctccccaccctcacaaacccctagaggtgtcgtgcacgtaatgacttgtattcactgggcactccactgggtactgattccctgtttgatcctcgctgacctcatcagatgctgctgccccactttacaggtagggattctgaggcatggagtgttaacagcctgcccaaggtcacctagttgcagaactgaattctgatcagcttgagccaactctaaaaacccacattctttccactattgtctgcgttctcgttgcatggagggataatataggaacatgaatgactatgagatttagaacagaggcgcaaaattcacttcagcaatgaagaatgggtagggaactgtgtaggatctgaaaggagaacatttgtttttgatcactaggaaaggcttcatgaagtttgagatgcctttaacgaaggatgcttttcacgggagggaactgccatgggaggaggaggagtattttcttgatttaaaagtattcgtatataatttagaagttgtttcagggtaccctggttttctcatgtagatcatcccccaggtttccctgtctcttcagcggttctttcctaaattagcttttgcctgactttccttcctttgcaacctcagtttctgattttatgtctagtctgtgactaataagttttcaaatagtaataaaaagagttaaagggactcatacaggtttgtggaatgaggcttgagaaactaagtgaagcctgaagtttatttccttttatgaacacagtgtgcttacattggtttattttaacataaactatttctaaaaatggagtcagttattatctactaaatgcaatttggtagggagatttctttcaaatcatgagcttctcagtggggataaaggaagaaaagggggttctcagtggtgaaaagattgggaaggaccaatattcttatgtctgtgaaaatcactgtaaaatttgagctaagctgttaccctgaagctgttttcccgttcttttacatcacagcagattttcattcttctcctctttcccttgtggtgaacagttgcatttaagcattatcagcattaaaaacatatttgggatgaaatctaagccaagcatctgttaaccagtcagccactttccaaaaccctttcagctgcagggagtgggtatgattccatggggtgtgagtctgacatcagaagacttgctgccttctccagagagatggcatccttttgtagattttcagacaagacggactacttacatttcactgaaggtgaaaagttctaaacaagacctcaattgtcaatattacattttgcaaatctactaattggtttatatttgaaaggatatgaaatttgggtgttcccccccaccccttttttaactattgagatggtattcattaaaactgttggcaaaacctgttttggaattaatatggtaaaagattgaagttttacattattttcttttgaatcgtgaaataagtttttaagagaagttcttgggtccctagaatgagtcattaaaatactggtgaggttttttagggaaatagcattgtatgtcaatacgttgaaagaaacaaaaatgctactttgattctcttttttatttatcagtgttagaattaaggcttttaaaatcctactgactttgtttttggtgaagacttgctaaaacaatttgagttttcttcaaagaaggatgttttccaaataccttttttcccatatgaactacaagtatagacattttggggggccttcctcatatatattcaaatttatagttattgtgttctatgagtatcatgaatctgcctgatgatttcataataggaaattgaatgacactgatttggggaaatgaggtagaaattatgggttaggcagaagcttctgtaatctgttagtaattgtttggtaagatcatacaatttgtacatagtaaagcaagctagtgaattaagcttttcgttatcagatgctatgggagtggtctgagaagggagtaatagagtaagctgttggtttctgcttaagactaaaacatgtgctttaaaaatgttcttaaaaccctttatttaattgaaacttgattcctactataggctaaattttatattgttgtggatatagaggcattgtcagctctaaaactctgattttaggatgcttcatattttatattatttaaaatagcacaattttcaagaaggcaaaacagtagcaattcaaacatggatttgttcactttgggttcttgtttcttctgtcttcccccagacactctataattggatttgcttctaggtttacatgttaggatataccagttagattagcagtacagcctgtcggtgccaaagatgtgggacaaattatattccattgcaagcttagaacatttttttttgtagcagttcaatacacttgagtgctatgatttttgaagttaaaagtaaattgtattattccaacgacactgtaaatattaattacactgatcatagtcactaatggtgtttgccatgtgccgggcactggtcaaaactcttgcctgtatcaactctcatccttactacagtgctagtagatgtgcatattattttacagatgtggagacagagatatggaaaagttaaataacttatccaaggccacatacctgccaagtggcagagacaggcctggaatccaagcagggaggccttgcttctgtgctcttagcctctggactactgcagtctacttcatgttttccgttgactaacagaaagctcttttctccatttctttactgtggcctcagatatgaatgtatgtattatatgtatataataaagacatgctaaatcatcttaacctacaaatctgagtgcagaataaagatcatttctgtgaaacacaaaagataccaatcttatacaaatcagggctcttgtcaattcttatgattaaaatattattaaaattgatagacttttttctttggggatcctcacaagaagaaaatagtgttgcctaccaggcataaaggagttctggttttgtatccatactggttcacaaatgactatcaggaggaaaagatggtaacatgctccccactgcccccttttgagacaaggtctcactgtgtcacccaggctggagtacggtggcaggatcatgggtcatcgtagcctccgcctgctgtgctcaagcagtcctcccacctcagcctcccgagtagctgggactgcaggcgtgccaccatgcctgcctaatcttttaaaacattttttttacagagatgaggtctcactgtgttgttcaggctattcgggctttttgatctattatttgattgctccaagtcagccagcccttatattcccactctactctgcattgttggaggataaaccagaaatgggaaacacaggccctgccttctctaaatccctctctactccggaaggtaaattgcaggtgagctttgggataccttgctcgggcagagggaacagacacatgcagtggttggcggcccagccagggggtctcttctctcacagccacatctgcaaagacagcagggcttggttggagactttatcaggcccctcagtgtgaagagctcaggaggagctcagtcttgtgttgaagccagtgaagaattccgggcactcccattactgctatggctctttcctgctgcttctgtgtcccctctccggctcctgggattttgggtgtgtccatgtcctggtccctgcctctgctgttactcccccctccctctccattcgtgtgtaccctgccttttctctcaatgttttgctcgcaacttagacatgaaatgttttttttttttaagttagatttaaatttgattaaagattatattccttaatgcaagtaaaattccacccctcctcccaattcagttgtttctagcttagagtccttggctgatctttatgtctatggtacttaaattaagtttccatgtatctgttataatggtaacttttattatgagagtctcttcaaataattagaaaatgatttttggaaaggtgtatgtcaaatagaggtcataatgacaaaacataatatcttataatgaatgtaatattctggactaaaaaaaaattattccataggagggtataagccaaactagtttttccccagcatttgttttcctcatacatttataaggaaaacatatgggatagaaataattaggtgcattaaaagaccatattgactttctgtgttagcattttttctttaattgtgtacatttttcatgagtttttgtctagtatgatccatttttggtataggcatgccaatagcctagagcttttaattcatcaaagagagggtatttctagaaaaatagcaaaggcctcataggagcctaccacttgctgttcagcaaactagctagtacaataacagcgccatatgcagggccatgcctggcagaagggctcctcttagggaggagtgactcaggtcctgcagccaggacctgcttggctgtgcagctcagccgctgctgaccaaggggaggcaatttagcattttacacttcgggtgcgttgcttaaaataaggaaagtaaaacatcatggaacgttttgaggtctttgggtagcacactttaacatagggattgatcttttaggttcatgaaggtagatcttaataacttaaaattataatctgtttttcacaaagatatttacaatgttgtattatattttgcatttgaagttgccagtttcgggaatgcactttgaagttgtaatttcctgtttaatttatgatatttaatatagaaatgcataggatttctgaatgatggtttggcattgtctgctgtaaatggggcaaatatcatggaagaggctatctttgaagctatagagaatgtagaaatcagatgctttcttttgagactattaaagatactgggttttcatagtagtatgtagaatacttaaaagcaccttatggccagtttttccaaattggttatttacattctagaatatgatttttctgtagaattgttatctgtatggctgggctctcaggccagccctagaaattgtcttgtcctataatgttgctgaactgcagtactaagaatgtcagagaaaataagcattaatcattaaaataaatttgaaattctgctgagcttatgggaccatgtttgactcctcaccgtagcccacagcggcaagaagcagcacctgggaactccacgttccactccttgccgtcagcctggattgcagcgggtccttggtgtattcaggtggcatctgtgaggattgggtcaggctcatacagggaggctgcagttgctggagcagggagcacagggtaaatgaggtttggggtctgtgagaggcataggcagagggggtgggctgcaagggcagctaggggaggtatagccccaggaaaagagagtctgagacaggcccagggggatgcagctccgagttaagtacttgaacatcgggagctatgcatcccacagttctctacagcaaacagtaaaatattactgacagacttgggaaaagccagcgagtcttttgagtcaatgaaaagatagcatttgctgtgatcagcttctctaatattgttcctctgtaagggtttcactgttctcaactttgaacatccactcgccgttctgtggtatatccatttgtccctagtatttaaattaggttattgtaaaagctcctttgcacctgttgaaaatgctggcacagtttctccattagtaaaccctagaaatctgagctctctttcactgaagtttcttatttcaactggaacattcttcttgaatgtgtgtgataggatcagtgtacggttttcaaatggttcagtctttctgcaaccacaaagtttcttattcaggggagtgcttgcagttctcttcattcccctcctccacttgtagatgaagaaaagaaaggcttatattatttttgaggcagctgctaacaaaaaacttggtttcttgagagctgtgcttgtcattgcttaaagatagtgtatgtcagaccaagctggtgacagttctgcgctactgaattggagatgcctcggcgtggagagtcttgtctgcagatcagtggcctttgcaatagacacactcttcttgaccgtttttgcaccgagtggactgattgtaaggctgtctccacctgtgcacacagaggtccctgagaagaacacggggcaaatgaagggcaggcgtagatattctggcccgtgccacagatccagaatagctggtgaccctggtgtgctgccaccatttccggccaggaatttggccttcctaaagcacagtttgccaggtgatgtccgttccaggtaaatgacacaggcaatggaattagaagcctattagggtgttgaatatttttgatgtctattccatttaggacaagattgaagcctcctaggttagagtgtacattcaacattgcttattattctgggagtaactcccggttaacgatataaggggaaaaacactcattatccattcccttgatttacttaaatccctgataaattttacttcccctctcaccttaaaccatttcttctatctgataaacagctacagtttcgttgtatcctttgaaacaatttaaatcagaaggtgaaagttcaaaataatgccttttaaagatagaaaataaaacataattataagatcaacagtattaaatttctgctacttcatttttcttaaatttaaaacttgatttactagctgttaaactagggggaactctggggtttaacatcattgagggctgggaggtacatgtgtttgtggaacttcgttaatattttaaaataccaagtccatgaataaagtcacataacctctttactggaacttggaaagcgcagccaggaataggcttcactttccctgtctgtctctgctcttggtcgcttctcaggcagaccctgtggctgtcacttctcttttggatattggaacagtcagtgctgtaggcattaagagcccaagccagtctcaaccggaatgtcactctttcacccactggaagccctcttcttcccagctgaggcctgccccctttctgtgggccagcctcagggaaggggctgtatttcttctgtttccctctccagtcacccctcgcctcctgttccctgtggcttctccatctgggggctagggacaaggaagaaggaaaagggtaacactcttttgactcagccattccctgccattctgttgtgctctgcttctgtctctgcacctgtctctcggattcttcggagacaccccccacaccacctcctggaatgttccttggcatggtggtgcccactcctggccaccttcacaactccccttcagagtgcaccctggaggtgctcccctctccaccctgctcactgagtccctttgccttgcaggcagtcctcctggcctcgctccttggtgtttctctgtccacaccagcaatgtgtgtcctcccaaactacaggtagcaggccaccgctgtctgtccaccccccacctcccccttccccacagctcagcccgctgagcaagggctggcacctgcattgtgcaggcctggtggcccctcagtgagcctcgtgtgctttcttcacgttggtgttagcctgtgtggtcccttccctctgctgccctcggctggagcctgggccaagtcaagacatggaaatgtcctgtcactgtcacaactgggtattggatgctgtaatccattgttgtgatgtgtggatgtaaacttcagaattaggggaagattagcctgaactatgaaacatgttaatatgcatttcagttatttccaaatgtagaaatatacttttaaatgagggtttcagctttaaatgaagtcttactaattcgtatatcctattatggtaagatataaaagtcttttaaggaatatgttcttttagattaactcaagacttgaagtgatgttgaagaaactcttgatcatttgaaccctgtttgggaaactttactgaattttatggtagattccttgtaggacacatacatatttgattggtatatgtcatataagattttgcattatattgcacttaaaataggtgttaattttgttttaggatgttatagtctgtgctaagaagagcatgctattttgacaataaagttgataagttggaatacatgggcttagatatataaattaaatatagagagggaagcagaagaaatatagaccactaggcagggcacggtggctcacagctgtaatcccagcactttgagaggccgagacaggcagatcacgaggtcaggagttcaagaccagcctggccaatatggtgaaaccccatctctactaaacatacaaaaattagctgggcacagtggcttgtgcctgtagtcccagctacttgggaggctgaggcagaagaatggcttgaacctgggaggtggaggttgcagtgagccgagattgcgccactgcactccaccctgggcaacagagcgagactccgtctcaaaaaaaaaaaaaaaagaaaatatagaccactgccccttctttgcagctggggttattagcttatgactgtgggatgtttcaatgggtcttgtacctcatggtatattaggaaatcatagagttagaacttggtaatgcaccaagttaaaataatcaaaattagattttgaaggaatcattctttaatgttattaccttcccacttaaaaaattacaaatggaatgtcaaaccttaggcattaggtaactgaaatcttatagcatacccttctgttcagacacttgctcttgcgaagtgtgttgaatgcattttagtaacatccactgccaatttaaagtgacattgagtagattaggaaagtaaaataaagtgatttgatccattcgttacttgaatggttaattttatgttgactgtgtggattaaatacacccggggccccaggcagtgtccctgcacctgctgccgtaggtgagggggacaaggcctgcctggaacagaaggcagctcagggcctgggagtcagtttcctgaggggagccccttgcaagcgccgtccacacagggcccccaagtgctgcccacctatcttgttcatcctccctcgctgtcaggaactgctaccctgggctgtgctttggaacaggtcatcagagctgacattggtggacactgttggtgtgtgctacagtggtgctcagtgctttacagacttctcctgtaatcctcagagcaagcccaccaataagaaattctgatccccatattatgggcaatggctccaaagctctaaggagtgtattaacttggacgtggtacttctggggtttgattccaagcctggctgacttcctgacggtggtgatctctctcaccagactgagagccctcaaaaaagatttgctgagcttctgtccaggtgaggtgctatgctcaacacaggggtccaggtgagctagatgtacatagttcctgcctgaggtgcccataggctgagaatagacgggcagtcttggcagtgctaaccttggctggaggcagactgacttgtcggtttttcagaggtagatgcatggcttctcctatgaaggaaaacagtggaaatgtacaagagaaatagaaatggagtcttgttggtaaaacagatttggaaaggttgaaaatgatttctgatttagttgatttctgagttccagagccatcctgaaattctgtggtgcgggagattgttggtaggaagctgatgagagcccgcccatggttaggcttgcccatttgttactacccatcactccaggcaaatgccagtttacagagtgagtggagtgggggagggagggaggcaccatcattacttcagcttgaaagatagctgaactttctggactttcgaggggggaattgccaatggagaatgggttcatgtggttcaggcttcatttgttcctttatgtgagtttaatttgcatgtgttgaggttaagcagctggtccgaccccttggcataaacaccttgttggatggtgagatggagagcagctataaagggcaggcatgtttacttgcaggacacattttgtgagcaggtttcttggtgataacgtcattctgagctgatgcctgccttgctggtttaatagaattatgtaaaaatgagcagaacagcattctggacccagtgacagccctgcatgaggattggtttaaaaacctgcatcctcaagctgcctgacacccagagcagcttcatttgatggtgggagagaacatggagacaaagtataaatcacccaccctcagaatggaaagctgtgatctggaatgagaatgcatgttctgctgattttcataccaagttcataaaaagaccaattttccccctttccactttagcaattatcctgttaaacagtgtgctcgaaaaggcacagggaaatgacaaataagaatttgttagagaagtccaggctgcttgattgtctcatcttttggagcatgttttatttttgacacaaaggagaaataagggcaatttacaccgacagaaactgcagccctctgtagcgcagccctgtgaggtgctttagccagtgagcagttgctcctcccacagttcatctttgcacaaaggagatgatgtaatccctttagctgccggccacgtggccagcatgccgtcactgtcttgacgatacctctgagccacctctgcgctgccagcagtttatcggctcagagcgactgtgcgtttgtaattaaattgcgttttccttgcatgcctgctccccctggccagggctgtccctcacctgggtaggcctgttaatgagggtagtgtgtggctggctttacagctgaactgcagtgggagcttttatgcagaaaaatgaccagagtagcctcttgtacagcgctatggagcctctccgtatgcccacaaattagcactaggggaggagatgctctgttgccattagtaaccgcttgcctatttattaggggagtaaaaagctcaaagcttgggcttttccctcccttgccctgctttcccatgagttctgagagcacccgagcctgtacactcgagagggatggagaggctgtactgtgttcagctgtgtgtacatagaagcacatccttttcaaggaaaactgaatcctcctatggtgctgttttttggttgtgcctttctccgtggtcaccattgcatcctgtttgattgagggcagtttgatttaatagctgccatgaattgtgcccagatttgctcaggtgaattaaacactttacacgcattttctcactgaattctccagcagccttttgaaatacatggcttaacagaggaggaagctgcggccaggagaggtgaaatgatttgctcaggcccttccatgtcagaaaagggaacacacagaagacagaggagggggcgaggggaaccctttgaatttgatccccattatttttttctttaaagaaaacatgagatttggggtagggggtgtgagccctcagccactgaggcttgatgaggccaggacagctttctgctcttggtcctggctttcttggggttggtattatggtgatcaggtgctactacatgtcagatacaagaagttacaaggtttccttgatttcatagttgatgattttaaaagtgaaactgtcttgattgtattagtagaacctcttaggaacacaatggaatggcccaggcttctggccctatgcctctagggactctcagttaaactgtgtccctactgattttgatcagcactcacgggcagcacgtaacctgacagagcctaactcctgtataattaaaaatcatggcacccaaatccgagattcttaaactaccatggtctttggagaatttggagatggagtgaactggagatggcaaggaacacttgttggtgctgccgtcttggcgctgggcctgtgcatctgttcctccctctccacagccacctgcagccttggggcaccagaggctgggcagcctctttgaaaaggcccctctttctccctctggacagcataggctcctcactgactgggtgcagggggagaagaggtggggcgtcttttcgtttattgagccttcacccttgctcacctcgaagctaccctgggaggtgggaacaattggggccttgaattcacctgcagagggaaggtgtgaggatgggggtggcctaagtaacagatgaagcaggtgtcaacagaagccatgggatcaggaacagattatttgagaaagactgcatctgttttctctctacaacctgagaggaggctgaggtagaggtgactggatgtgactacatttgaccaacttttgaaatgacagcagagccttaccagatggttttgaaagaggcaacttaaaaaaaaaaaaaaaagcccttcccaagctgtggtacctccttaaccagatgctgtaaaatatgacattgaaacaatcagtttggctttgtttatacttgtttacagaaggaaaaggttactttcttactgtaaactcactcctggcaattttgtgccttgttcaagattttgtctcattaaaaattaagcatcttttatgtaagactctttgcagagacttcagtatgtcaaggcctttgctttacgtgccatgtctgttgatagatccagttgcttttccttcctgataattctacatcgattccttgctcactctctatccagctgtggcctcaccgagcacctggccaccatactagacttcctgcctgcaggcttgccaccttcttggtgattttcagggtagctgctcaaccacgtttactgttaggtgcccactgagaggcagcccttgtaactggcctgccacaggatgtcagagtggcaggaatgccccagcaggttgaactcacattctacaacaggtcttacctggatccccgagggacttcatctgtgtcctttttaaatggtacctgtgctttctgttgctgcttctcataaaaagaacaaaagattgcaggagagcccaggaaacaattaaaaccatccctgagacatctcctttcaaactgacctttctagatccgaattactccctttaaatggggttacttgtatataaaccaggaatacagatttttatttttaaaccagagggcatcatccctctgaggcagcctggccccgagccttctgcagctcactccaggagagagggacgaggttgtgcagccttcctgcctccctaggtgccattcattgagggagaggttgaggggagtggaagcaggcaaaccatgggggagctgaccccagggcacacccagcaagactggcttgtatacttggggctcctggactgcagtaccgccatgcacactgctatcatttcgcctcactggggcagcctggccccaaaattacaattagccattcatttaaccagggaaataccttctgtgtcagcacagtttttagccactgatgcaagtgactctgatcatatcactgttactccagcagtagtcaagacaaactctgctcaagaaaaggaaatgctgatttcaaagaggacaggagtgctgcacttgccacatgcaccacggtcttctgggtatgggaagaaaatagaaaaatcttttaagaaatacttatttatggcttatttttaaatgcctatttaggggtatgtgtcactgcatacatactttactagtacagaatagtacgtgtgtaatttaggattgaaggtatgtagtgaaattctttagtgataggattttatttatgtatttatttttgagacatctctcgccctgtcacccaggttggagtgcagtggcatgatcttggtgcgctgcaccctctgcctcctgggctcaagtgatcctcctgcctcagcctgagtagctgggaccacaggtcccggctgatttctttttttttgtggagacagggtttcgccatgctgcccaggctggtcttgaactcctgagctcaggtgatctgcccgccttggcctctcagagtgctgggattgattacgggcatgaactcccgcacctggccagtgctgggattcttgatcaaaagtgtttgaagactatgcccttaaagcggcaattctcaaagtgtggtcccagggaccccttgggttccctaagacctttgtagggaatctctgagttaaaactattttcacaacagggaaataaagtcttagctatttctcactctcattctctccaaagtgtatgctgaagtcttccagaggctacctgacatgtgacatcacaacagattaaagacagaaacataagtgagagttaagatgagttctcttaaaccacacattaaaggaagtctcaaaagtgtgaaacagcgctggccttctttctgatttttttttttggaaaaagtattttatgttaatatgtaatgaatttattattttgaagatattatttcaaaaattctctcagatttaatttctaatatggtaaatacccatatatctgagatatctagatattaggtggacagaatagtaaagtaagtaataaatagaacccacgtaatgcagaagctccttggagtcctcaatagttctccccccctccccccgcctgagacggagtcttgctttgtcacccaggctggagtgcgatggcatgatatcggctcactgcagcctccgcctcccaggttcaagcaattcccctgcctcaacctcccaagtagctgggattacaggcgcccggctaatttttgtatttttagtagagacggggtttcaccatgttggccaggttggtctcaaactccaggatcctcagtagtttttaagaggtataaaggagtcttgggcttcaaaccctcagaaactgcttgctgcatggaggaccatgatcgccttgtctggttagtgcattccagcaatgtgccatgtgaggcgcctggaaaggaaggatacaggaagtggggagccctgtggatggccaggccatctttctaccgttggtcttggctctgttctcccgcgagaaaggcaggaaggtttttggtctccaccctcctcctcctgtttcttctccaaccacaccagtagcataagtgggttattgtatatgaaataggctttggtgggctcctctcggaccctcatagcaacctgtagcattatttctacgggaaaatatattttttaaattgagaaacagcagtcttcttaacaaagttttggaacccagaccacttggaggttggagactgagtttatgggcaggtctccccagcagttcctttttggcacttacttgtagggaatcttaaatgggaggaactattagaggaattcagttgagacataaatagaaagggaaacaatggggtatcctgttcttttagtctcacacttttaaagcaaaatatgaaaatctagtttattgttttattggttcagagagtttagaatccaaaattgatttcagattaatctcttgtccactaatatgcctgtttctgtattcttcaactcatttggtaaaaggtagcagcaaatggttgcatccttaaatacatagactggtctgacggacaatacaagctttaaagaggatgtggaatacaaccctttgggaaaacagtttgatattaattcataaacttgggaaagtgcgtaaacggtaagccagccatttaaccctgacatatctctaggcgtagagatccactggccttgggttctcgggtagtggatggggctgttcatggcagcattatttgtaatagcaaaaatgagagacaaaacaaatgttcacttacaagattgccaaaataagttcaagttgtagtcatcaaatggaacactatgcaacagtgaaattgtattaaataaaactcagcacgcacatcaatgtagatgagtcatgcaaactggaggcaagtcacgggagaacgcaagtacagttccagcgtccctcctctgaaatgctgggcaccagaagtgttttggatttcagatatttttggattttggaatatttgcatatacaaaatgagacatctcgaggatgagactcaagaccaaacacagaattcatttgtgttttgtatataccttatacacataacctgaaggtaattttatacaatattttaaataattttgtacataaagttttgatgtgctttgattgagacctgtcacattaggtcaggtgtggaattttccacttgtggtagagtcatgttggtgttcaaagactttaggaatttggagcatttctgattttctgattagaggtgttcagcctgtagcatgattgcatttatataaagctcaaaaataagcaacacagcaatatattgtatactaataggttaggtttgtaaatggcaaaactgtaaagaaaaataaggactgaatgacatactagtctgttcttttgttgctataaagaaatattggagactgtgtaatttataaggaaaagaggtttattttggctcattgttctgcaggctgtgtaggaagcactgtgccaggatctgcttttggtgagggcctcaggaagcttccacttgtggctgaaggtgaagggggaactagtgtctcacatggtgaaagagaagagagagaagtgggaggtgctactctctttgaaacaaccaggtttcacatgaaccaagtgagaactcacaaagacagcaccaagacattcatgagggatccacccccatgactcaaacacctcccaccacgccccacctccagcatgggaggtcacatttcaacacgagatttggagggaacaaaacatccaaactatatcaaatggttatgcagaaagtccgcatagtggttacgtctagagccagggaggtgtgtgcaatcagggaggggcatggggaaggcttctaggggagtgtcagtgttctggttcttaaaccggatagtggtttcaaacatatgtaataaatatacacaccttcttacaggtcacatcaattctcttccaagtctggggactattttgctgagactttcattttagtagctgaaagaattagaaggattgattaaaaagcctttttgttttaccataaagtgagtaattgaatatttaaaaccaccaggccccttagaagttatttactataatggcaactgcccgtcctcctcctgtttggaggttttgaaggtgttacagtgttttggtcgcagagttgactgatgatatcgtactgtgagctttcacaaaaccatctggcctggcttttgcaagaataaagaaggaaaacttagtgtggcttttcattactttaaacaaatgagttcagcctttagcatagtgggccaagggtgtggcaccaagggcagtgtgtgtacaaaggctggcatctttgtctgtgtgtccagtcactgttccctgtggtgtttgcctctgtgccaaagtagagtgggaagatcctgtttatttttgattatctgttaaaatgagagatgtttgcctattgaaaagggagcccaaaggtggaagccgaagatgggaggagaatgaggtctgtctgtgcctctggcgacctcctgctgtccagtcgcggctttccgccctcttgccctctggacaccagacaggctcctgcaggcacctccaccagatccaggggccactagcaagggtgaggccgcagctgcaaagcgttgtgatagcattcactctcacctgtcccacctccatcctttaagggagacacggaattcttagcacaagtaacaagatgcagaaagatagacaggttaatcgaagcttttgttgtcaccatttgggagagaggtagttagtagtctcttccaggaaaaaaaaaaaattttgctcacgtggtttttttggctcatgtgtttccatttctggttgtattctggctggcccttttcacagccaggagcaaggctgagcaggaccctgagagtgctcaggtgcttgtggggtggggaagggggacagacggggcgtgggaaagatcttcccgagtggcttgactttcccattgccttatagttccttaaattatttatagtccacctgggagaagttatggagaaattatttatagtcaggttaatttactatgattgtgtggatttttaaaaatatgtctatttgttagtggctttttaacaataattacatgtctcagtctgttcttttagttttaagtaaagatgtctgtcttaacagaatacaataattttaggtaaatgggcaaaaattcccaaaattcagttatttaaagcacttaccaaacttgtacagctaagtttcagatattaatactttaatactgttacaactgctactgttagcatttgttagtgagttctgtgagctgtgattctcaggctgtccatttcacagacgaggaagcgaagctttggagagactaggtaactgcccacagtcaccccccctgggaggtggcaagcccaggctcctaactagacacctaagtaactgttgacacaaaatttcgttttgagttgtggcaccattgtggtttgcagccgatgtacttaacacttgtaatgctagtgaagtgcagctttgcctgtccccacagcgagcgtgctcctgaatcctctccacacctcatccccatgtgtgtagctcccttttaaggtggctgcttgtaaccctgtgtcatttcctctgctggatcccagctcctggggcagcaggcaccctgaggtctccctgcagggtactggaatgatgctgtaggtgcagagagttggccggtgagggagtgccacacaccttatttaaatgtccttactgcactgccgtttttattactatactaagtttaatttggaaaacgatgttccctgtgctttttagtagataagatactgagatgtcctgtcaggagtgtagcaattaggagactggaaaaaggaaaacagattccccagcctacaagacgttcagctttgcagagtcttttaggatcttaccccactcagattgggcactgcagggcaggtgtctaaagatatgaaactgcggaagagcttcgtctgcctctcaccttctacctccccagtatttattgagggccgcccagtagcaagcaggaggaggccctgtggccccagtaccagcccagttgcctctagccatcccagcctcctgctccacagcagtggcccagggggataatgagtgagatggtcacacagttggagctgcttctgtgggaactttttgtgatcactggattagctgtgccgtgtcatttcaagacagtggaagcagatgagggctgcagtcctgctgggtggtgggctgcagggcactgatgcgcagtcctctgagcctgtgctgccttcgagttcctaagtaccaacctcccctgaggtaatccaagggaggagacgccaccaggccacaagtgagctggtcgtttcctcaagctcacttgcgtctccaagcagtgatttccttctgaggcttccctctgccgggtcctggagggtcctcacgcctccagcggtcactttcggttttagtgtgtgtgtttgcatcgttctgttgatcagtgaatgtgtttgaatatgtatacagatgccaagagagaggtgagtccatcacagcaaatctgtttctgtgtcaaaatttgttttcccatcagtatatttaaattatttggcttaataaacacatttttaaccagaatgaaaaaaaaccaaaaacccaccactcaccttttgtctgtatgcagaaggtaatttgaggggaaaggggtaggaggagaagaattgaaatgaatttctcttttctctttgttttctgcgttagcagatgcattacttttctcaaccctctttgtaatttcttaaatttctcattagcaattcagtaggagggtaaataataggggcctatctaccagaattctttttctgcttgagaaaagagggtgtagggcaggacagcagcacctgagtcaatatgagcaaaagccagtggttgccagcatcagtataatcctgagacagttggacaggtatggcctctgggttaacatacttgttgagcagtcaaatctttttacaacaaatagaaggatctggaagaaaacttccaaattaactgtagattgcatgctgaattcagcctaaaaacaagttacaaagtgccaggttttttgttttttttttgagttgtcataatagtaacaggattgctcttacgggggttcttagactgctacaaggctgtctggcctctgcaggtcaataaacatctaaagagcaggacttggctggcctctgatcggatgaatcctcagagcatcagatgtattgcaaattacattcagagaagaaggaacaaagctgtcaaagcaaagtagattaactgaagtaacttaggcaaggcagtttatatgtgagctataatatgggtttctaatattagaacatcacagtattaatctttgaacatgttacttacgttattattcactaatgggctttgtgtttctaatctccacagcaagcgtttccaaccctttcagaatggtctggaacaccttttttatgttaaggacttatttttagtgtcagcgatagatacagcatttcaatgaaaagtaacacttttaaatggatttgtctaattaataataacagtatctatatctctttacacataacagtgtgttttggaagacatatttgtcagctcttactgtttacacagttaaggctacggttagtgtaatgtgtgttttattttgttttagagtataagcttcttaaaatcaggaacatgccatttaggggaaaaatctctggggtttaagagagtaccatgcataaatatgtattttatgaatgccaagcgattaaacacaattctaagctttatcaagggactgactggcagaaagttttgccaaattctttgatgttattaaagatttatttttgtactgagtttcatgttagaatcaaatccatgcttactgaagtggaaataacttttcaaaccttcagttaaaaattctgatgtttgtttgtggcatttactttatattctatattaataggagtaaatgaattaatgggatttttgcagtgggcatggacctaaagtatcttaacgttgtggagtacattagggaaactttggtattttaaatgtgtaatttagtaactctgaatactgtattttaaattcaacataattacaggtcactcagattaattgatagcttgttcagacactcagctttggtgtatgttttccccagggctggaaaatgaatcaacacagaatactggagtagaggggattggtaggcatttgttggtgagcaaggcccctggatgaggattgcggcttcagtgactagtacctgcacctaccccctccttaaacccttttttgtttatctgtggaggaaacattcattcagaatcagaacctttgagttttagggccggcaggaggtaaggctggggtagaggctactcatgtggagataagctagaataagccaaattttaaacccaaatcgtggttcagtgctgggaattcagttcctttttcttctggaaatgtatagactgtctggaacgctttggcttggcctacctgttgtatagtgtttgttgtgtacccttcgtactcacagtgagtcccaggcaggatttcgtgggtaaagtagtacagatgttctgaggagttacagtttgtgctgggaggcctcacagaggcttaacttgtgttcagttaatgtggcagcaaatggagtcacgtgagccctcagtaggctgcctccagccagccttatgaggctgagggacctgagacagcagtgtgggctaacattcagaagaacaaaggcggatgctcagctttgaggtgtgtagagttgacttggcttgctgcttccatcatgcttggtctgtttacaaaatctcataatgaaaacatttcagtgtcacgttaaattcttgggggaaaagcccactgactgcagagaagcagagctgtgaggctctgtgtttcctgcttagacaccacttccctgaaggcttgcgtttcctttggttgtggaggtgctggaacgacaagcctcccagttcacttcttccaaagcagagtctcctctttccatcagagaagattggtttgtttctttggtttgggcagataacttctaaattacgttgtaaaaacttaaggtaaaaacccttttctcctttaaaatatagattgattatatgtaaatgtgattttatgtactaatcagtcaccaaatatactagacagagaatgaatggagtcactttagcttttcaaaggagtttttatagccagttgcatgcgttggagctgtcgctattgctctgtgcctagatggatactctgcccagaactgcgaattgtagagtaccacgtgtttgctatcttgaggtttaactagctgggtgttaagttcatgctctgcgccatggcagtctgctcagtgagactgccatgcagtgggactcagcatagcccctttcctttaggagcccagctgctaataggaacaccgagaagtcttttgatatttcccctgcagtgcgataaggatttggggtgttgtgggagtgcatcttggcggtgtctagttgagcagtggggactccagactgggggcaggtgaagaagaggtgtgtgttgggggcggggaggggaaggcatgtgtatggaggtacagtggtgagggggaggtgtggcttccctgcaggtaattgcagttcctggagtgagcctggggagatggtaatgatgaaccaatgaggttgtggaggcagcatacatcagatcatgagggactgtagttgcgggcaccaagaaaccattgaagaattttaggggagtaaaatgatgagatatttgtttgagaaacatgctagggagagtggcagaatgcattcgagggaattaagaacatctattaggagatcgctggaatagcacatgagggcaatgctggcagagacaggggtgcttcatgggactgtggagtccctacaactccttgtttcatggaggtaggggatgggagagaggatggagggcagggagaagcctggttcctggtttggccacgaggtcgatggtttatgaggcaggtactgttctgggacctacactgtggggagcaggtttgtgggcatgagcatgaggcagggttggatgttcaggggggcatggctatcctataggcatgtgggtgcctcttcttcatggcacttctttgttccagtgatggacagtttcctacctatcagtcaaaacccactataatagcccaccccacccctgctttcttctcttccatgaatgttttgtgtttttgtttgtctacatctattgatgctgcttgctctggctggagtgctctctgttttccagtgtgcccggttttggactacttcttccacacttcgcacagatcttttatttgataggacatcttctcctattctcatcgctctggccctgatttttccataccaaatatctgtaccacagaactgacaactcatatgtgttgctttctttcccaaacaggctaaggtcaacaaaggctctagattacactttgtatatgagcacccccaactccatgcagagctagtccatgtgcactgagagaggttttcagataattagtttatatcacttctctgtggttgagagcccctctggccccagttccttatgtagtaatcaaaaagacaatagaggaaaaggagtagaattatagctttattttctgaagccttttacagaatatgattttcttttgcattaaaacacatgggataattgagttttttctttttctttgtctgaagaagagtaagagtgttaaaattcgtgagcagattgatacaatgattgaatagggtttcttttagcactcaaccttcttgatctgatgtgtatcaaaccacttgatatgatgatcaaattgtagtagttttgtccctctggttcatttgatacacactaaatttctaaatgactttcctgagacactccggtaaagcaagtctttggggcaggacagcatcacagaaccctatatgtgcatgtatgtgtgtgtgtatgggtaaggggatgtatatatgtagataagggtggggtaactccagttccagaatacagcctcagaggcatccctgacaggctttacagggacatgcacagacaggtagacgaatgtgttctttattctggcattaggcaaacaggatcagttttctctgtgcatagctctgtgcttgtccctggggatccaaacatgaacggcacacctgggcacatggtttcttttttgacttatgagactgtaagaaatagagtccctttataatactactacttcttgactatcaaaatattcccttccattggtctgtgatgcttttaaattaacttccattgcacaattaatacataattaaaacatcaaaccttaagagttctacagattgcttcatttacattaaaaatatatatatttgtttaaacttttttttgttgtggtctttttgattattttggttttcttttgtattttatattaaaaaatagaactattttaagttgaaatttctttaactcccttgaattaataaaaaataaactactttctttctttgaggtatgctgttataggctgttgcttctaaaattatgtgaaggggtaaattagccagtccaacagttataaccataaaggttataggtaaaaattgtaatgctgtattatgaaacccgtccatattcttgtgtggtcttgtctgtgaacatgtccataagtcttaattcattttatatgcattttataagtgtggattttgatatatttatgttaaaaaaataatataagcattgtattatgttttgattttttttttttacatattagaaaaagtgagggttataaccttgtgtcttccccccaccctttaacatgttcattaggggatctaggcttgttaaaatgcctccttcctatgcatcacttctagatgcgtgcacagctaaaacccttgatagcacaaacatcgggcagccacgtgcggccgctccctgtgctgagagtataatcctgcgggctccgcagagaagtggccggcccggagagggtgacgtcacctccctctgcgcgtgcgcttgcggagcgagggcggtgcctgccaaactgatgcagatttatcactcttctctttgtgtgcaggcgtgcgcgcgcgaagtttcccccaaagtaactaatgagtaaaattcggtaattaccactaagacccagtacttataggaagctccagtttactatttaaccttctttttctggttgtttaaaaatactggctgatttattaacatttttgttactgctgcaacctgtgttttgttaagtatgtaggattcttttttttttttttttcccaatctcttcccgcagattattttcccatttagtaaacactaactcggaatagctgacaggcaaatgaaacccctgagaatgggtgaggagcacagcttgtcttgtgggcttggctgcttttaaaggaggagacgcagccagtttagaatcgcatcagttcattttgttcaacagctcaaatggtcaaggaataactgtgtttcttctaacagtttttactggaaaactcatttgactagtttaatttgaagattaggtaaaatttcagattactagtatctgccagtgtcctgggagaaatacaggattaaaaaaataataaaacctatgttttacttaaaaaattttaaaatttgattcatttgattcatctttctgccagttatgtaaaaataccatttttaacataatatgctatataaaagcttttgctcattgtgaaaatatttctagggtgctttttattataaataaatcggagaggggcttgttgttcctggactatttgttattgttgtcttaaatttaatgccacagaagtgaccaagtgagcgagcattctggtcatcagtgactagcttagaaaggtatttgtctcagtgcagcatctctttgcagggtttcaggatgacagatgagtaattgatttggtcagtggggtattagatagttgaagttccagactgttgattcagtggaaagatatttcactgttgaatgataacttgcagaatattccttgttagggcagagagattaattttccatcttatgaatataaatcatactatgattgaaggctaaactacctaacatttcacaaaacaaaaatagaaagtactaaggaattttggggttcttgggtaggggttcagggtcaagatgctgtggaaatatatttatttgttggttgagttcattgattgattgattcattcattcatccatccatctttcttttccttttctttttttttggagacagagtctcgctctgccgtccaggtaagcagtggcatgatctcggctcactgcacccttcgcctcctgggtccaagtgattcttctttctcagcctcccgagtagctgggactacaggtgtgcaccactgctcctggctaatattttttcgtattttagtagagatggggtttcaccattctgcccaggctggcctcaaactcctgagttcaggcaatctgcctgcctcggcctcccccttcatccatctttctacccagccaacccacatctgatgaatgccctttgcctggccctatcttaggtatctaggatacagcagggagcaaaacagacatgtcctctggcaaattggctgatctagagaaaaagaggcaactattcatttgatgaacagtataatgtttattattaaggaatagaagtgatttgggggtgcagatttaacatttatgctcacactgacatgctgtcgaaccaaacagtaatttaaaaggtggtaacagaattaattttggcaagtagtatgctgaaacttgtagttattttaaaatgagtatgttaaaatctctaaacattccaatttgttttagggaaaggcagttttttgtgtgttggcttgaaaccagaaagaaaatcatcaagcaccacctatatatatttatatttagttaacaactataaaatctgattttttaacctaagcctgttttcctcagtagcattcaacaaatattagtgtaaacattctgaacatagtcattgtagacttggttcagaagcatatttgttgcctgcctttaaggactcccctgggaaacatcttctgcacctagagataagcctcgactgactccattcttgctgtttcactgtttcctgaagctagcttttcattagagtccataatggttgctgtatttcagatagtagcaaaatatgcctcaaactgtgacggaatccagtctgtcttttctgcgcagttaatatgggctctatataacttaaaaattatataattcaaaaagtgggtacaactaaatgtcccccaatttgggccatttaccctctggttatctcctctcaagttgctcttctttgtctaggctttctgttaatcctaattttaccaaatttctctttgtggcacccccttccacctatttaagtagcattgacaaacccccctggtggcactgagaagtagaaatgttgctgacgcctggtctttggtacaaagataaggtctgggatcctatcagggcctctgtgcggtggtatttgctgttcctgaacctctctgtgatggtgagaagtatgtgcttccagggggcggccaccgagggcagcctgtatttgctgctgttcagtaagtttgagaaccacagttagatcctttaatgcatgaatgaagaaagtattaggagttgagtcttatctgctgtgtaatctagaatctgtggaatagcagagaagccacttatttttaattttttagaacgtttttatagttccacactgttttcctaaatagctcttcagggcatggaacacagcctgcctttttgatctgaggaactttcatggttgggttcttcctgctttttattgaaagttacatatgatatatttaatctggttttagtatttatacatgcttcctgagttctttgcttattggttttttttttaaatggaaatgagatctaaaataatacctaagtgaccagtcaccacaataatgacaaactcaagtttctttgtgtggttagttttatatttttgccctttttatattttctgtttttgaagtattaattgatggtttaaataaaagtaactctttttcagtgacaatctacaaaaatatagttaaactggttagaatttatattctggtctatgcgtgggcatgtacctacatcgcaataaaagtgaagcaccttttcacataagtttctcattaattcatgtacttttcttcctctagaaagactgagtcttccttaatttggggggaaactgagggaccaataggttaacataactacagctctgagaaatgaaaggtcacatgagagggagtccatgactcatagtgggacataggaaattgagacatttattgagttctgttttctgcaccctactttcaaatcaatatgctattcctcctgtgagatggcctggaatatgacagccctcacttccatcttccactccattgtgggtatcagtaaataggtgtgattcagaaagttagcagtaattgtcaaaaatgctttggaatgatgactcaggtcacacagctctctattgggatatcagcattgggatcaggacattcttcttggtgatggctgtgtgactcacaagtggggctctgtctctctagtgtcggagccagggctgcagttggtggtgacatttctctgtctgagggctttgctgtgtcctggccatgacgtgtgggtgtggacgtgggaatggtaggaagcatgcgttttctcatctgagcaacagaagggggaatcctcccttcaaacagatagggatctacagctgtcgcttactccttcctagtatttgtctatcatgtgatctgtcccctcctcatttgcctgggtcccatagcacttcgtgctgcctatgaacatttcataatctgccttgttttataggtgtttgtcagcttgtctctttgagggtcgctggggagccttagtcctctttgccttgcagttgccccagtgccatctgtgtccacggcagccacggcagatgaagtcagtctttgtagacacattcagtgagttacggtgactggcagtgaattgctgactagattgcatccattcaagagttttgaaggaacctgaggatgaaattgcagaactcttggctcagatgttttgccttttataaatagccactgttttcaaagcttggtgggttgccagcacaaagcatggtgcattggaaaggaaaatggcctggtgctgtggaggccccagctcggtcaaatctacccataactggctgaatagttccacgcagccttcctaggacctcatggtcctcagccggatgtgtttgctgtgaagtctgtggtaattgtcagtgtcatagttaaatctcattaaactgggttcattatacacgtggacgtattctatggacaggagcgatttacattaagaaatcagatcacaccgctgatttattcattctttgtttctatgaatgataatgttgtagagactgaattctgctatattcctcccgaagatgttgattttgttgctgcttgtttgcctgctttagcaggcatgtaatttggcctgacccacactacacattctctgtgtttgcagtgggcagcaactcaaattttgatgtagatctttaatccttagcagggctgcttggaattcacctggtttttgttttgaaagctccacattgcttagatggggccctgccctcaggctaacagccctaatgatgggttgtgtacccagggtcatttccttttccaggtgtctctcccagcttttgtcattctctagtgcctggagagagtcgttttttataaatgttccctgtagcagggcttgcccgggagttgctgctcaggacaccaaaagtgaaatgttcactccttgacttcagtactttccttgccttctaattccaagtctacatcttgctgtggttgtattaccatgctagcatttgcgatgcttttcttgtactattttggcaaaaacaaacacaaatgggggtggggaagtggtgttttgttttttcctagagattgttctgctaacagtgttagttactagttttggtaggcatccctgaacctagatgacctctgttagagatcgccgagagaaatatccagttattatgatgagtatggacattttggaccccaaattcccacgtaggcattcaccctggtgagctgggctagatatttttgggctgcaagaattccttttgcttagatggattttggcctaaattgcctattgcatgctccttttctacaatattcccactgggccttctaagatattgggagcaggggcagagttggtttttagtgagaagagggaccttggccacctctgaagctggagtggcactgggccgtatgaccacattagccattgacattcctccagggggcatgacccagaaagcctggaaggagaaagccaggccccagctatttataatcccctctctccgccttgccactgtgtatttttaaccagaccctgaagtctgatggaatgaggcattgagctccccctagaggttttaggatgtcacaagcagcaatttttataaagcagtgttgctgttttctttgtaccagcaaagatttatgtacattaatctacataaaaattaagatttggtaaataatctggactgatttcatatcctgtctccttttgggaccaagttgttattgctagaaatgactcagagcgagccttttggggacatgagcctctgggtctgtgtgcaaatcattaaacattaaaatagaagacagttttgtgatcacagacatggaatttaaatgttgtgctatgatcatgtttcttaagttgatttaatggatgtggataaagctgctgtgttggcattggatagaatggttaaggaattaactgtcactctggcaacccagtaattttattttctccttctgtatttcagggtttcgaaaaaacgatgaaatgaaagctatggatgttttaccaattttgaaggaaaaagttgcatacctttcaggtaaagtttaactttcaactctgctctatccaactgctctgacacaatttcagagtctgacgtaataaatgaactcacctgccacaacatataaaaacattggcatttctatgaattttgaatggctttattcttgtagcactgtttctgagaaattagtgcccaaagcattttcttccagttaggaggcacatgataagttagttagtgttggtgatgaaaatacatttgtttctgccattcaacaaaaattcagctgttctgccccaatcagttaagtaaaaaaactgattttaaaaatccgatcatttcaacaaagatggtgggaatgtgatggtatgtagatgggtcctgaatttctcacttttgtttctcgtactctgtacctgcctctgttgccttgtcttttgggaggcaaggatgcctgcttctccttgagatctgctcctttgtggctctctggtcatggagtaactaggacccatgtcatggacgatgaagccctggtgattttaccagctgagtctgtttccctgtagacccagtctttgaggccctggcccgcccgcagacagactctgggccagtcccttgggcttgggggcacctaactgccctctcttctgcacatagtcagcgttaggccgttttggactgtcttcttggggcctccctcccacataaacagaacagcccttgggtattataccttttggaccccagttcacttgttaccaaacaaagatttgcaagatttttctgctctatcaggaagtacatctgtagattgtcgtcacatgcttttagatgaatttcccttgagaatttttatctttcttaaataggcattctgtgctgatctgtgtatcctcttgaacacatatcatttttaatatataacactgctagctgcttttataagtttttctgtcctttggacatgtgatactgctatatatttaagatgcagcttcctatggtgtttttgctaatcttgttttgcttcatgttcagtaatatttcttggcccctgttaatatggtttgattttgtgggagtaaatctaattcattatgtatttggaaggttcacagaagagtgtaaggagttcatgaaaagaaggtgctttaaattgttggaaatacatggtgaaaaacaaatactggcttacaatacactgagttttaaaagtagcatttatttgctcttctctaatcatttactgacaaactgcattgtaaggactcatgccagctttgcgaacccctgattttgtagtttacaaacagagtaattgaaagactctacttataaaaattagaggtatctgtaaggaaggcttaaagctgagttcatgtgtttatcagttttttatttttaaagtctgggtctgtgataacagcacctgctcccccaacccctcttgtgtttctgaacgttttgttccattttcttctttcattagtacgtggagatggacatgtgaagaaaggtggaaggttaagattggtgggttttatttgtattcatgcttttattaggcagttaatacagaatatattatcggctgacatttttatatagtttacagtcaacactaaaactgtttaccttttaatcaaagaaacaaaatcggcagtctttcagagtttgtcttaaatgtttaataaatacttaaattctgcagggttacataaagttggatatctttggtggggtgggaagttttgctttaccacagattagtaggaactgtttaagatattagcgatggtagagcttccagcagtcttagcaaaatgacgttagtaggtgtcacctcacttttacagtattcctaatttatgaccagaactggcaaagctgattagcatgagctcattgctctttgttttaggcttatcgttatctcctttaggagggaaaaaaaccataaaattaagtagaaattgactacttgtgttgtattacattttttgaaaattacaaagaatgagtaaactttacaaaataaaatttatctctaactcatttttttgtttcttttttattgaaatctaattcacatactctaaaatccacctttttaaaacgtgtgattcagtggattttagtgtatcaccaggttgtgcaactgttaccactaattccagaaccttttcatcacctcccaggaaccccatatccacccccaagcccccagcactggcaatcactaatttactttctgctctgaccccattttaaaaaatattagggaatattatgatacctttgtaaaagctgtccatgtgaatggcttttaatagttaaatctaaataaaatggcaggagctttgtaaaagtaggccaaaagatgagtgattttaaaagatacttattaggtcaagatctctaaaaacccagtgataaaccccgtgataatttcttgaacttgaatatttccgatccttagcgcctaggtcttctaaaaagtaatgctgattgcacttaagtaagatagaatgtactacttccttcatttaggatgaactcagtgaggttaaatgtcttactgactttgtgtttgaagtcagaggacggtgctgtggtttgatggatcacctccaaaattcagatgttgccagtgtgatgctattaagaggtgggacctttaagaggcaattaggccatgagggctcctcccttgtgtgggattaaggcccttataaagaggctttacccttgcccttcagccatatgaggacgcagcattcctcttctgcccatggaggatgcagccctcacaagactaccaaacctcgtaaaaatgccctgtagtttatatttaatggagtttgcgcctaatggcatcttacatataatgtcaactattagtgtggttcctatgccactagggtttgagccttagaaaatctcacacgacaaccaccagaattaagaacgcattcttttttaactgtttattatggaacattttaacatcaaaaggaaagaaaatagtatagtgaatttgtacgaattcgttgcccacttcagcaacttgtttcatctatatttccacttagtcttccgttcactctggataattttgaagtaaattccagatattattttatttataaatatttagtatttatctcttaaatgtaaatgttataaaaaaccgctgcaataccaatgacagacctaaaaattgaaggtaattatttcatatccccccaaaaaacccgataggtattcaaatttttatgcttgtctcatatgcattgctgctggttgagatgtctggtaaggctcttttaacctgtaggttgtgtgttacctcctgatgttttaggaagcgaggaatccaggtgtcttcctgtggattttcctatagtgtagattttgctggttgtatcactgggtggtttaacatgtttcacttcccccatatttcttgcagactaggagttaggtcttgaggcttgattagaccaagctttgatctggcagggaaggtggcaaaaatacttaatgggtgtgattgtttagtttcatagggagttttattaggagagtcttgtcttatttttatggtgttcattgatgattattgcttagatctagtatttaagagttgcaagatggtgatattctacttatgtcctttctttttcatttattaacttggatatcccgtaaagagagatgtcccatcaccacttacttgattgtcctgagaaagagttcatacaggagaagtaggataagtgattggttcctgtccgtaaccagttttcaggctattgaaaaaggaccattgtttgtttgtttgttttttcccccaataaagacttatttcaaatgcatgattttaaatatatatgatgttttgattcattacacattttctctcttatgaagttaaaattgtcccatctttggccaatgggagcctcttcaaattggctcctaagttttgtttgctgatgtgacaagatgtttcaggaccatcttgtataattcctgcctcaggtctggaatcagccatttctctaaagagccctggttccttttagtaggaaacaatacaggttgctaggcatatccaccgggtgggttgtcgtttttgtgtctctttagtggacaaatctgggggaaaacacacacacgcattttaatgagaaatgatatcgtgactttatattaaaattcatagttcaaatttaggattatagatatttcattttactttttcaattatatatttgtggatatctgtttcatgaatctaaaaatgttagttcttatgtggacataattacttactttgtaatgctaatggtattagcacagtatatgactaccaaatgtaatttagtatttttcttcttgtcttggtcctgaggatgtatgctattagaaatctacagacctactactgtattttaaagtcacatgaaacagttcctctccatgtggatatgctatcagcttgaaacctggaatcatttgtttcattttgctttacatttgtaagacttaaaaaccccaacttgcttcaattttaagtaaaacttagcataattccacagtaataactaaaaaatagttaaaagttaaggtatggttaaaaaaaatctagtttttgtgtttgctttctccaccctgtgcctcccctataggaaaacttttttttttaagtttttggtttaatccttctgcttttaaaatatgagcaattctattgattttcccttctgttttcatcttcttctccccgagataaacaaaaatgtaataggcctcattttctatctttgcttgttttatttcaaagaatattctggagatcagtatatagcagcacataatagagttctcattgctttttacagttgtgtattactctgttttgtgtaacagagtaatacacaaatatatatataccagagtaaaacacaactctgtctctatgtgtgtatatatatatatatatgtttatatatatgtgtttatatatatgtctatatgtatgtttatatatatgtgtgtctatatatatacatatatatacatatatatacatacatatatatatatacacacacacatatgtgtatatatatagttaattcagtcagatgcccattgatggacatttgttttttttttttcttttagaatagctttttggggtgcagtgaacattcactcttatcaagttggggatattgacaggaatgtgggatttgatgccttaaggtttgctggtaccttagttcttcatggtctagttttgcagagtactgcatttccccggaagagaaggggaaccttccattcatcttgaatattcttgttagcatcctagcatagtgggagctggcagggactgactgagagtgcgggaactggcgggacttttcatgcaggctgccgagtcttctcagccttcagtagaaatactccatgagccaattcctggttctcaggaccaggcagcaagaggtgagcctagaaggtgcagggctggcgaggtgctcgccttggctgctgttagagcaggagccccgtgggcgtccttttaacagagttgtattattttatggcacacttaatagacgttagccatcatttctctttttcacaaactgtgtctttcagagatttccttggcaaaggctgctttttattgtcagtgtgagttagactgttccttgggagttgggagtgggaggttggacagcggctgaagaatcatttcaattgaaacaagcgctatggagagaaagatacagttggttcgttgaaatttacattttactcctcaaagcaagcgtggctttcttgcaagttctttctaaataagtgaaaggtgagcttctaattcatttaaagagaaagaggtgattgtgaatctagctgtttctgtggtcatcctgggccacattgctcaagagaccaagtctcctggagttttaagaagagggaaatgaggtctcagggtttaaggaaataagtgtcacacagacatgtatagctatagtgtaggaccctttcagccttctttctattattaaaataaacctcagttcccttagcatccacaggatatccatcaggcattgctgctaactgatacctgataggaggtatttttagttaatgttgtgtggaatatggaaaaataatccattcagcaaatgccagtctcactgggcatggagagcattgtgtattcttaaatcagcgaatgaaacaaagatgtttgccctcatggagcttatgttctagtggaggagacagatagacaaaaagaatatgtaaattgtaccatttcctagaaggtaagaagtgccttagagaaataagattggttataggagaggatgcaggtttatgtgaactgaaagtaaaacaccatcattataaacaaaaactggtttgtttttgtttttgttttttgctttttgactaaggcagcatttggataagcagataatcaatgagctgttgtttggttacagacatgaaaagcttccatacatagacatcctgtgatgctggcagcatttcctgtctttttcatttcattgtagaaactaaggcattgatttcctatctataaaatgaggctgacatctgtcccgcctgcctcaccatgtggcttacggttgataacacacacacatgagtgtatctaataggtgaagtttttatgaactgcagtgctgttatttttactagtttcggaacaggaacagaactttgcatttgtgacttttctgcgttatactcagatgctattttcatttgggtacttcctgtgatgttggaaaccaacctaaatcttggggaatagaattaaacagacacctgtgtagttgattttaagctccttgaggtttagcgaccatgttcctctgaactatacttcatcctttctaagattttttcttcatacctccctgaggaggagtcagcagaaagtgatcattaactgcgttatgccatctattggaaggtgcacccttagcagggagattagcatgtgaaaagattcttacttcacaaatgatttttgataaaattgtaaaaatatcccagtgaattttctgaagttcttttctaggaaaaggaaaagtgaaaatttttcctctatcttaaaattcagattcaggtgtctataagcttttcttaggacatgactcagcgcctaagcagatgaacttggtagcaagtcttaggatactgctcactagtgctaccagcctgggagaaatctttgtagttgaaagttggaaaagtgtagtaggggctgtcaaaacttctgcacagagctgcctttggttctcaggtctggggtgatcagaatggccgtgcgcattgtgcaaactactgacttccatgcaactttcttagattggcagattttggattctgcttctcacacccgtggtggagcatgccttgcttgacttgtgagctacggtgacccaggagggaggagagtgtcatgtgggtccctatggaatcaaacatcatgctgcatttcaaacacattttaaaaattcagaactgtggtcgagaaaaaatgttagatgctggctttctctttacccaaagtgaggggaatgttttaatttaaataataggtactgtatttttaataattcaagtttctgtaatatgtgttgatctatgataatttcagtcaaggagattgactcttttgaaaagcatgaaagctattgggaaacgaaaaatattgaaattgttaatctgtcttatcttggggatgagaggtattccaaaaaattagagccattgatgttaccctaaaaatcatatcagatgtttcagaagatcagttgataatgagcagtactgcttctcatgtttaatagtacttttcattcataaatgttagccccctctaaggaccaggaacccgttatttagttatctctgtgacatttttactactaaaaaagaagtaaagccagtagttcgaaagatcatgcaattttcttttgtctgggcgaagacctagcgatgacagtgttgcatagttccttcatctttatttaagcttttggagcctcagtatctttataagactggaatgataaaacctctcaacagagtcattgtaaaatcacatcagaaagtgtatgtagagcacgtgataccctacctggatctgttgttacctatgattgttgctcccatataatacctaaattattggatttagaaataatttaaggcttttctagattacatgactgaacagtacatgtggattgctttaagtattcccaatcaaaatgaagtttcattattatttagaatgagtacataattcctatgaagttatgaaaaccatattggtaaaatatgtttttaaaataccatcatcttctgctgtatgctttttggctgttctaaaaggaaagaatcttctgggtttttttttatttgtttgctttctttctaattttagatgatgatttttggtgcacagaaaataatgaagagttttgtattgtgacttgaattttgaggtctcccgaagagagatcattagagttctaaaactaaatgaaggatccacttgagaaggctaaattttcttcctctattttcctgacaaccccgatggaagtaataaaataaatgtgacaattttaccataagcgtttagtgataccaagctgacttcattaggattgtatatgttaacaagaaatcgttctgcctgcctgtctgtcaaagtcacatactctgagatttgtactcttagtgtgtgatagaaattttctaaaatccttaagctaattagctttaaaattctcatgtggttctctcacatgcatgtgtgtggttctgtgtgagagactggcaaagctggaccagtgagggtcaggtgccatccgtcgcagattataaagtcatcagcatagcttggagaatgttccttttgctttcctttcaagacttagacccatcttgttgataggaaagaaagaactttgaatgcagggcaatggggaaaaatgtgggggagactggcctagagagcagctgtgagggaggtggttgtctgaggtgagtgaaacacatggacgtgacaacttttttttctgtccaaaacataaaaactgaagaaaggagtttttcccaaaacattggaagaaaaagacaaggccatatgtagtaccttccatgtggcctgcagagctcagagattttctcccagatcccctgaagggatgacatgtcctcactgtgcctcagctgaaacaaggacttctgccctgtgcaaatttgtgtagttgctttaggaataattttgacagagtgaatggatgataacataggatttctgtcttatcttgtgtctaagtgtattcctaatgtttgttttttaggtgggagagataaacgtggaggtcccattttaacgtttccggcccgcagcaatcatgacagaatacgacaggaggatctcaggagactcatttcctatctagcctgtattcccaggtaagttctgtgtggcttgtgcttgtcactgatgtcacatttacaagagatgtggcgctatactcgttagaaatcagctaaattgtagcctgcattccaggcaaagtagtataaaatgaaagtcattatctttcaccttattaccattttgtgaccattattgtctagtgtaaagccctttggggagcagggacatgaaggtaggtaagagctttgtgtgttgacagtggatctgggatactcagctgggatttcaggatgtggcgcctgagttagaaagccattgttgatgattctaataccgtgacacagaggcctgggtgatcagaattgggtgctgcttttgacaatgcatttctgcctacttggcaaacgttagttctttaaaaatagtctgttgatatgtagcacgaagtttgtggggcattaaaaatccttattagctatatattgggcgtagatttgggaatctctatcaaaattgagactccattggtaatgggaatttttagcatagatgccaaagaacaccaagagcaagcaatgttgtgttttctggagagtccgcaagtggggagtcatgagttactaggagctggcctgtgtgtatacttgaggaatttagaatctgtttctgctctggaaatgtattactcgagtttaatttgtagatctagctgacaactggtggaggaaatttcctccctatattaatgtattagttctttctcacacttctattaagaaacgtttgggactgggtaatttataaagaaaagaggtttaattgatttaatggctagggagccctcaggaaacttatgatcatggcagaaggcaagggggaagcaggcacatcctcacatggttggagcaggaggaagagggtggaggtagggggtcaggtgccacacacttttaaacaaccagatctcatgagaactccatcaggggacagcactagggagatggtgctaagccgttagaaccccccccccccgccccgtgatccaattaccacccaccaggcctacctccaacattgggggttacagttcaacatgagatttgggtggggacacagagccagatcacaccaattaatatctccatttaattgttgcagttatattctggaaaacataataccatgctgatataatctaaggatacagtcatgcctggaataggagatttggtgtgtgttgcaggttggaggggtgcctatctatgaggaaagggtgagtcctcaggtgtctcttttattccagaaaggcacatactgaagggcatcagtggcagccatggtagagtgagaggaggtgtttcctaagagactaaatgaggatgtgtgagagaaaactcggccataatatgggctggctagatagtaaccttaaggaacatgttacaagagaatgatgtaagatggtaacagcataatgggtttcaggggttgtggtaaaggtaatagatctaccacagcacgtggttcacagcactcaacctgtgtaggttgacacaagcgggacaaggcagccatgcccctccctaacagggctggctgtggctgatggcaatcagcttttggtcttgatagtttgacttgctggggaggttcttgggttttctgtcagagtatcctttatgagaaaactatcactgtgtggcatcagtgactaagtgagccctacttatctggagtaagttttccctttcttcttctggtatttcttaggcagctgacctgttgaaatcttagagttggaaagtagtttagaagttatttatactcactatcatttataaataaaaatagagtgtaaactactacttactaagctttgactatgtgccaagtctgtgataatgatggaaaaagaaatacaaagggcagggttaaaaaaaaaataactgccaatcaaaatgatacttgtcatatagtttaataagaactaaagttgaatttgatattcactcttgtgaatttgaatactatatagtggtaactttgacaacttgctttttggtcttgaaacctatgttaatagtaaatattaaaaattattcatttaattgatatagaaattggttcaagcacattttggataatctggatgacccactttaaaaaaaaaaccttttttttgtgggaaattgtgagaatacacaaaagtggagagaataatatcatgaacacacatatacccttcacccagcttcagcgtttatcagattttgccaatcttgtttttctctaattattcacctggtgtattttataacaaatcccaaagatcacatcatgtcattcaaaaatacttgagtgtgtaggatgaccctccggccactgaacagtctcttcatgtcagtacctaggtttgcgtttgcattaactgcagtcccaagtgacaagaaatgccattttgcttgtcctcgattaatgagcaaataagagaggtggattaacatgtaaatgacgcatttgccgagtgataatggagaaagatttcagagtagtccaaattgaaagaagtggccacaaagtgagtcctctctgggccctctcccccagggtcctgcaggtgctacccctagtgagtgtatagcagcaggagcgctgtttggttttaaccaaacaaattatgtgatacagatttcaccaatctgtaaaaatcatcagcaaattactggtgtgtgaatttctttggacttgtgattttgcttatgtgtagtttgtaagtctgatggtttgttgtagtagagtggtatgaacacaaggcgtttctacccagctgtacatttgtgtgtatgtcttggggcctgtgagaccttttgctgtgtccagtgcttcctcgtgcttcccagatttgaaggcagcccttcggccattcctcagttagacagtcacagggctggtgtcatatgtgaagggagaacatgggcctcagaatcagactgactgtgacctgggacacatgacttcactttcattgctttcctgatctgaaaatgtgataatgacctgtacattttgggatcattgtgagtatcgagtaagattattcctgtaatcttgcatggtgcttgacatgcagtagcttgctgagatatagtgcaataattttctgatttcatattcacccttctattttccttcaattactttccttttgacatgatttctagaggcagatcacattgttttcttctgcatgctttctagattgtctgggtccggcacagttcaacaggaacgtgacctgagcagctgtgagtgatttgagtattattgctggggtcgcccctccctgcccttttttttttaaacaaacaaacaaacaaacaattgtagtaacaaggtgagttcataagattcatttgcaatgaaactttccactaaacgtgtgtaggagaaataagaagcagcagcagttcttgctgctgtcattgcaagtcctgcacagtgacattaatcttagaatgtctctcggtggctgttgcttttattacttgaactgtatttaatactaattatgttctagaacattctgccttctttagaatgatttttggttgctaaatattaacagataaaccactcttactccttgttgtccactaatgaaatgatacgaagatttttaattgattcattcataaatactcacataagaagatactttcttcctctaggaacgaaacaagtagagtttctcttttttagggacctgtgttgaaaggggaccttatttttatgtgaactttctttatctcacagataaacatgaggctctttggtaaaaatgctaaaataactggttaataagtcacatttcccaaagaacagtgtctcttaggtggtggaagggcttgggggcccttctccagtaggcagctgtttattaggtgctcataaataggacccaggtttggggatgtttacaagtcactgctgtcttaatgatgactggcttttaacttgataaaaatagatggattgaaatgctgtgcactcccagcccagtccatttgccattttcattacttaggaagccgctgggtgggagcagtttgatcacagaggaaggcgaatagttaatccttctgtaaactgtgcaagctcagcgtagcttttggttttgttgttctcccgcttattcctgttgttaagcctggagtcattcaggattccttttaagcttctttcaagtagaggggctttgtagttcgtgtgcatactgtgtaaggccatgttaggagaaagacaggcttcaagggaatttatcttgatatggtgaagactgatggttacagtgcggtctaccaaacagcaactagtaaaacaaataaaacatattgccaccgttttacaatctcctgtctttggtgtacggcagcagaatatgtgaatctggagtagaatgccttactgggcagcaggcttcctttgcagagctcttggcctccgggcacctgcctcttcctgcttaggctgccctcaccccagtgcctccagggccctggagtttctgtggaatggaatctcgagggattgcaaaccccattagagcccaaggaagtctagaatgcttaatttccatgacaggagactttaggagatgtttctgggagtcccatttgcctctaggtttcatgaaggaggtcagaaaacaggtgatgtttctgcccgtgatgttacccggattgtaacccacgacctaattgggatgtggaggagaagtgatggcatgaggagtatttgaaatcatttcaatttacatccctatgagatagttattagaagttcatcacatcgttcctaatcagttttcagcatttgggtgataaactaagctgctggatctgttttctcctcctggctttagacactgtgctcctctgactgtgagccgccttctgattgggtcctactgctgggctctaaccatacaggcatttttttggggtgttgatgtgatacaccctcttactgatgtagatgtcatatgtactttgcatttgtaaaacgtgggaagctagttagtctgatagtctgaatcaagatatagaagggaatggggtgtgtgagtgtgagttagttgggagggggaaggagggcagggttaggggagtgagcctatgtaagagcatgaaattggttttaattttgaattaattttatttgcattacttaatgatagcaattggttttccaggtttttaatttagactagttttttggggggataattatccaaagcagaaaaatgtcaaatgtcttttctaccctaaggtacatttatgtttggggaaaaccacatatgcgtattgagtaccataaggtcctaggtatatttccaaaaaagaccttgtaggcagtcgttacctggttactgtctggtgcaggcatcagcagcctgcacagactgtcagagacccctgtgtaacagtgagggttgcagttgttccttactgtagggccattcggaagcttctatcactgaagttgtaaccaagtgcgactaagtatttttttaacctgtgtttaaggacaccttaactcttgttgctcattctttattgcagatttgcattgtatgtgtttcccatgtagtcagtggttgagatttaatacaattagaagctggcactttttttttttaagtgcaataatgtggagaggaagaacatagtgactcccagcactgccttgacgtgtgtcagaggccagcagtgttaagccagcgttgctaccacataaaggcttagtacagttgtggaactagattaaaaccacagagcctgccagaagggtgccaagaactcccagggacgggtggatggtatggaaaaccactgagatagcttcagggccagggatagggtaaagggaataaaatggaacataagaaagttctcatcattgccagccatgctagtggggggtcattttcagcacctggggtgctgggagtcctggggtaactgccgtccacaggtctcagactgtccccagtctgggttttgttgcaggctgtcagggttttgtactcacccgatgctccctggagacctttgctcgcaggagtgactggaggagttcatgtaatcaattaatgcaccaaagtcaggagaaatgggcatggtgaccgttgttttcctgaaaagaagacgggatgcaaaaccattaatacaaaattgaaatcttaacaggttttgcaggttgaacatgaagcgtgtatagcctgggtctcttcctttatggtacaagggagggacgagaaggagctgagcacagtgtgctccttcccctgcctccgcacgtgtccagcaggggagggaagctgggtctgtggcacccagtgggactctgaccaggcagagtggcaagagatgtaacccgtcttcagccatgttttctttctctgcagcgaggaggtctgcaagcgtggcttcacggtgatcgtggacatgcgtgggtccaagtgggactccatcaagccccttctgaagatcctgcaggagtccttcccctgctgcatccatgtggccctgatcatcaagccagacaacttctggcagaaacagaggactaattttggcagttctaaatttgaatttgaggtaacttcccccgtgtggctagacccactaaacaagttggtgtggtttactaaaagctattgaggctaatgagagattttttttttaaaccacatattaaacaggagctgcatatcttacgaacatgtgatacgtaaaattagttactgcatgaaataacagagctgcgttcatcatccgagtggattgttttacccacatgggcttaggtttcagttcccttgggttgggtgatgggctgttgagttgtgaggccttggcagagaagcttgctggctgccttatatttcacttgacaaacagctttaccaggcagcactgtggctttgcacagttacagattcattctccttgcctcagccctggagatgagggaatgttagggagaaatgcccaacttcagagtccctaagtttcatcctgtcatggataatggaaagaatgcatgtattaggcctctgatttctgaaaatggagatagtgtgttaaaaactgtgcagagtcctgaattcagttaggcatggaagattgccgtctttcagtggtaaaaacaagacaaaaccctcagcccactaattattttgcttcccactgtaacctcctctccttaagctaccaaggttctgacaaggccttcggtgcagttagtttaatgagatgattatgggaggaaagtcttcctgccagcatgaaacttgattcttgctccatttggaataagattttaatattttctaataagaaatactttttggttgaatagattgcttcctctggcaaatctgctcaaacgttaggtttcagtggatgtattcatgtattttaaggtaaacagcaataatattaaacatcagacagtgttaatccttaatcttcaggttataatgctatacttttcaaagtgtttgcacaggtgtattacttggatttttaaattctttccatagtactcatttttctatccaaaatatgaacttagttttaaatttgaaactactcaggtttactacactccatcagaaagatgaacccagtaagcctttatcttcatagagaataggaagtaattttggaggacagtttattgggtgttaattattttcttgatgcagaattgaaagtgcattgtatttaattataagtgttttaagtaaaaataatggtctggcaatacaattcatacaggtttttccagtccagttttgatctctccctcagggctcttaaaggcaccagtttttctatggaacttgttacattgttaccagcctctctctccccacccagtgattgcctctgtggagattattaaaagtccagcaggaccgggtgtggtggctcacgcctgtaatcctagcactttgggaggccgaggcgggcggaccacgaggtcaggagattgagaccatcctggctaacacggtgaaaccccatctctactaaaatacaaaaaattagccgggcgtggtggcaggcacctgtagtcccagctacttgggaggctgaggcaggagaatggcgtgaacctgggaggcagagcttgcagtgagccgagattgtgccgctgcactccagcctgggcaacagagcgagattccgcctcaaaaaaaaaaaaagtccagcaaacgagagaggaatgggcctatggtaggattgtaggcataagtgctggatcaggagtcatccctcttctacctctgctgccttctgatgtttcttttgccaaccagcacgccggaccagcccttcttgttttctcttttggttctaggtcacaactctttctccttcacctttgtctttgcatttaatcttccccctccatgttttccttgaggcatattaatattaatctgcttcacatcatgataaggtgaggttaagatttcttgccgaggccaggcacagtggctcatgcctgtaatcccagcactttgagattctaagggaggaggactgcttgaggctgggagttcgagcccagcctgagaaacttagcaagagcctgtctctatattttgttttaaaaattagccaggtgtggccgggcgcggtggctcatgcctgtaatcccagcactttggaaggccgaggcgggcggatcacaaggtcaggagttcgagacaacctggccaacatggtgaaactccatctctactaaaaatacaaaaattagctgagcgtggtgtaagtcacctgtaatcccagctactcgggaggctgaggcaggagaatcacttgaaatcggaaggtgtaggttgcagtgagctgaggttgcaccactgcactgcagcatgggcaacaagagcaaaaccctgtctcaaaaaacaaacaaacaaaaatcaccaggtgtggtggcacacgtgtaattccagctactcaagaggcttaagatgggaggatggcttgagcccaggaatttaagcttacagcatgtaatcatcgccacactccagtctggaagacagagcatgaccctttttttccttttttaaaaaaaaaggtcgtgtgcgatgtctcatgcctgtaatcccagcactttgggaggctgaagtgggtggatcatttgagatcaggaatttgaaaccagcgtgaccaacatggtgaaaccccgtctctactaaaaatacaaaagaattagcctggtgtggtggtgggcacctgtagtcccagctactcgggaggctgaggcaggagatcacttgaacctgggaggcagaggttgcagtaagctgagactgcgccactgcactccagcctgggtgacagagcaagactccatctcaaaaaaaaataataataataaatataaagatttcttgcttagactgtaattgactaaaactttgtcactgttaaattgcaatgtagtacagattatatacaactctaggactgttcagaatcacagcagattattgcaatgaataaaacattgcctctatccttagctctgtcaaatgagcctctgccagctttcttgccaactcttgaatattttctaaatttttataaattcattcatatcccatcatctgttatttgatgggcagtggggttaggcttaggcaagatgaatgatagggtggtctggttggagcagcattcatcgtttaataggcagcccacacgtaattgaatttagagtgatgttacacttaaaagggttttgatgcccttgagcaagacgtttgtgtaatagcaagtagtagaaaacctccacagagtttctggcatggatgaaaaagaatggggagaagaatgcattgatgtaagtgaaatttctgaattgtttgctctgaacttgcaatttaacctgtttcctagtttaatgtgtctgttatagtgggttaatctccatcttcttggaaagaaatctcatttctttagctctcatgaaatacacgattctacagttttgggtattccagctgacatatatgtgttgctataatggatttgtctttcattgtactgataatgcttctttcatctacatttatttttatggggccagaaccaggtatgttatgttttctataaatagattactttaactttgaaaacctgtgactgagcattgcaaattgcattatgttaaaactatataaaattggttcatcttctcatacgtgattttttttcccttaagacaaatatggtctctttagaaggccttaccaaagtagttgatccttctcagctaactcctgagtttgatggctgcctggaatacaaccacgaagaatggattgaaatcagagttgcttttgaagactacattagcaatgccacccacatgctgtctcggctggaggaacttcaggacatcctagctaagaaggagctgcctcaggatttagagggggctcggaatatgatcgaggaacattctcagctgaagaagaaggtgattaaggcccccatcgaggacctggatttggagggacagaagctgcttcagaggatacagagcagtgaaagctttcccaaaaagaactcaggctcaggcaatgcggacctgcagaacctcttgcccaaggtgtccaccatgctggaccggctgcactcgacacggcagcatctgcaccagatgtggcatgtgaggaagctgaagctggaccagtgcttccagctgaggctgtttgaacaggatgctgagaaggtaaagacgggggaggctaatgcctcagtggacatgggggaagccagcgctggtgggttcgggtggaaggaaagagaaaaggtggagaatggtaaggctatactcaccgtgtgtgctctaaaccagcgagagtcatttcagaaatggcactgaaatctgttttccggttttactcgttgtgcaatacagtgctgttttagaaattttgagttcaaattacttattctttggtctaggatgcctgtaagataggaatgatattttcacttaaaagagtgaacatttcggccgtgctcacgcctgtaatcccagccctttgggaggccgaggtgggctgatcacctgaggtcaggagattgagaccagtctggccaacatagtgaaaccccgtctctactaaaaatacgaaaattagccgggtgtggtggcacgcgcctgtaatcccagctactcaggaggctgaggcaggagaatcgcttgaacccatgaggcagaggttgcagtgagccaagatcgtgccattgcatttcggcctgggcgacagagtgagactccgtcttaaaaaaaaaaaaaaaaaaaaaaaaaaaagtgaaaatttcacagggttatgttattgacaaaacaccattccaatctattgagtatgttttttaaaatcaagatgagtaatgtgttaaaagtaacagtttctgggtaatatagttggtaatcacctctagtctcatgttttattcttatgcaccaggcagaccaactggtcaaagtgaatccttatcaattactggctaattgaatcttagcaatgtggaaactgggcacttacccataggtatgtgttgcaagccatgaacatgggtgaattaatcattgagttttattggagctcattgaattttatattacatggacaggagaatattttgtaaagtaaaaaaccacattagaattcttggatgtaaaaggacttttcaaaaggtgataatccagtgtttttattactaaagcttttaatgtatctgtcagtgttcttttgttttaagtagcaccttgtctaagagactggaataccttcttttcaattactggaagaccaggttactgtcactgggattctggttcaagtcatggtagcaatgctaattgatgatagtcatctatattttcttaaatgttttcattgcaaatgtcttaattgacatccttgtccaagtaacatctatattgaaccttaagggagatgtcatagttagtttttcccaccttttttatagtaaattttatgtttttgcaatctgcacaggtgtctgtgtacttcttgatcaaacagtggaatcttttagtcattgatatttctgtcagtaacctgtgggcacagcagaacccatccagagacccataagttcctaatttcaccctaacgggtctttaattgaacctcactgtggcaaattaagtagttcagcgtggcagggagactgggctgagagtcagaggatcagagtttttaatcagcctgggggattagagtaactctctttacttatctgcttcttaattccttctctgtaagaggaacacatcagataagattttctggtaggtcctgcaagttcagaactgctgacttgttcttcgaagtaaagactcttctgagagaatcagacagcgcttgaagttgtccagggaaggaagttgccctttcttggtactgccccatctgtgggcttgtgtcagtaatttctctttctggagtgattgcgggttgtctttttccttccggtagatgtttgactggatcacacacaacaaaggcctgtttctaaacagctacacagagattgggaccagccaccctcatgccatggagcttcagacgcagcacaatcactttgccatgaactgtatggtaagacactcggaacagctggaccctggcatgtgacagtgttttagcaaatgggaggcatttggcaaattgtatgctagggctttcaaggggccttcggagtggctgttgattgtagcagctgaccttcacatggagggtgttccctagggttccattgtctcactatcccacattttaagttttaaacaaaaatgaaaacaagcaaacagacgaaccagtgaaacttgaaccaatgacttggctagttcagcacagacacttgggatgctggctcctgtgctgcacttcataggagcccacgggggccccagcaaagctgctgggaggcacagtgagtcccccagacggagcgctgtcagtttgctggctgctgttcatgacagcgaaaggagcaagcctgctgctgacctcagggcactagctagttctcctgaggcatgagatttccttccaagctgagctggaggactgggatctggccctcagccttgcctgggatcccctggccctctttaaggttgttgcatctgctacccttggctgtcgtgactgtcaggatcttagaggccagatagggggtgactgtaggactacatcacagaaaccaaaaccaaaccaaaacactgaattttgagtagcacttctgttacagttttatagttaatgttactaaaactgtatgttctataggacatttgcttgcctctgtagtctgtgaagcttctagaaatttcctcttcagggacaaggagttttggtttggactttaagccagccttgtgaggattgtccactcttaaaccttgtaacgtttgttgtagagcattaaagcaatatgaaccggcctgggcaacacagcaagaccccatctctaaaaaaaaaaaataataattaaaaaattagccaagtgtggtggtgcacacctgtagtcccagctatttgggaggctgaggctggaggattgcttgagcccaggagttgcaggcaacagtgagttatgatcacgccactgcattccagcttgggtgacagagcaagaccttgtctcaaaaacaaaaatacaaataaagcaatatgaagacagggtttttgtttaagttaattcagaaagatgccatttaattaaaatacagtcaactaggtgctacaatttaggtagtttcaaagataagattttgcaatataatttttagtaataaatgccatcaaagttttacgtctgttctagaatttaaagtaagagaatttctggttcgaatcgtcaaacctgggcatagataaaaatttgtttgtaaaaaattactgtcagtttttttagaattttctgaaacttttggcaagagaccattcagtctgctatgccacatactttaaaaactagaaatactaaaatatgtgctagaaatgaacagaaaaatatattctctcttccccctttcttcagcattattagtggcagatttaggactcaagggaataggaaccatagtgtagaagacaggaaaatgggttgtggacgtagaggcttttaattctgactttcttatttgccatgtgaccttgggaaggctgtttaacctcttcgagcctcagtttcctaatctgtaaactgggggtaatacctgccttccatggtattacatgtatatgtaaaatgcaaaacatactgcttgacatatagtaagtactgtataaatgttaattcttaccagtgatgttatcaatataattaaagatgcagttaaagcaggtaagaaacttaaaagtatgagttacagctattttttttgggaggggggtcgaatatattttctaattttctacaatatacttctgttacttttctaagttaaacttgtaatacaatgcatgcgggtagctcggtgccatgaaggtgatgcctgctggggagctttctggaccaggcctgctccttgtgttgaatacctccacgaatcccttgtatctgtggcatttaataatgcagggcaagggtatttaaccttcagccccttctgctcgctatagtgttttgaacaatttctgacaaaataaggatactaaataccaatatgccaagttaacagcttttaaagaaagcatattaagggataccaacaattatgcatgttctactctaacagatatttataaaaactatgatgataagcctgtaggtgtaggtacttttaatttagggaattgcacattaccatattgatgtccaggctgtagatttaggctgtatgccaccatactcgtttatgtgtgctagaagtgatggagagatggaaaaagcatcatacatagactagtaaagtctgtttttatataaaagtgacacaggaagctgttacaatctaggaatgggcaggtatggtcagtggttgtcacaatagagccacccaaggagacatctcttctccagatcctaacagagtgcatcttgtgcttttcctaacagacctgtcggactggctttttctcttttaaggatatagagaaagcaaaattagcaaatctagtttcttgtcactttactaggagggaggaaaagagagaaagaatgcacttgggaatgggaggccttgcttttaatttaccagatgccagttagagcgttaatgccacacgagccagagaggtcaccttgctgagcatggcttgactgttgcagcctctttctgcgactccagacatgcgatgtctgttagctgattctagccttcagatgcagcccggagatgtaaccctgaggctggagtcctgtggctctaatcccagacagaggcaactccaccaagttctggtttgggtcagaaatagagggaaaggatgaatgaaagaagatacaaagaaataatgaacaagtgagttctttcagctgcttacttgggtggtctgcaggcagcaagagacaggaaggaggctgttgtggggtccttgttcgaggcagtgggagatttgctcagaggggttgtgtgggaagtgagagaagggggaaaaacgtagggaagtttggacagatcaggaaatcagattggggcaacgttgagaggagccaaagaggtatctacgattttgggggacccatgggaaggagtgatgtggtaacagtgaaaaaaataaaaaatacatgaacaacagcaacttcggatttgctgaaggtctgaatcccgcaccacaccacaccctgcgatactgagccttaaagaactttggaggtggaaagggaaactccatatgagagcttgttctgcaaaaagggtgggtttttaaaatccctatttttgcaataaactgatagacttgaagataggaattttgacagagtagaaaagctttatttaaaatttgagcatagcgttgttgtgtttttactgcaattcatattcctgggagaaggtggatctatttacagaatattttctgttggcacccaaaaatgacttgggcatatgtagaaaggagagcttgctttcacacaaatagcctttggttgctaggtacgtgtttttgggtttctgggttctggttaaaaaccagagcgctgggtccctcagttctctgtgactgcctggcagcaggcttgccatctggaccctgttcagtatttgaagccaagaagtgagtaatagtatatttgtgtgcacccacttgtgtatttgattgctttgtgctgaacaattatgcctttcagctagttgatttgtaattttacagttttaaaaatagaaatggaaaccaatacttcaagtttatggaaatctagagagcaaatatgtataatattatatatatcaggtgatgctcctgggagagatgtgatcactgttagaagcctgtgtttcagcaggtggcatctgggcttcttagaagggagcctcctatttgctctcccctaaggagccctcttttcctgcccactttccagaacgtgtatgtaaatataaaccgcatcatgtcggtggccaatcgtctggtggagtctggccactatgcctcgcagcagatcaggcagatcgcgagtcagctggagcaggagtggaaggcgtttgcggcagccctggatgagcggagcaccttgctggacatgtcctccattttccaccagaaggccgaaaaggtcagtgccttgaacccccagcccacgaggtggtaaccagaatagttcttcctccatgaatattggtgtgtgtgcaaacactcttgtgtagcacatactgtgagctccgcatgtgagctctgaagtcacttggccctgagtttaaattccagctcttttagtccttgctgcgtaaccttaggcaagtgacttagcctctctgttttgttttttcatttgtaaagtagaaataaaagtacctgtttgagtggactgttgatgtaaatgtgatgctaggtgccctacacagtgcccggcacagtaagcactaagaagtggcagctgctcttctcttcccctcctctcctggctccttctttgctcttattccttgttgatagtgctttattactccaattgggatggtttggtagcaaggaacggaacgcccatccgtggtgcagatgtcaagggtttagttttctcacaaactgcgaagttctaaggcgaaggcacctctagctgcacggctatggaggggtggtgtctgctgccctcaggcttgctgggcctcccctcacagtcagggcagcacacctcagctccacgcaccagctcctcctcagccacagtgctcaccctccgcagggatggctgtagctgtctttgcctgccactttataagggaaacattatttccagaggccccgcccccagcacatttcccctcggctagtcttggggtgcacatccatgccttgctgcaaggggtgggggaaagggtggatctggtgtttagcctccttagggaggtgctgcccgcaagggtgagggaggaaaatggcttttttgggtacacagttgacagtgtctttcataattataaacttagctacatggcatctgactttggcttcatttgttgacagatgtgttgtgtcaaaatttctagtttaagaagtaatgggtaatatatgcccccaacactccccatacctccatttaagcaaacttgcttaaacaaacgctctgaaagtagcaaaatgaaagggatttgctcatgactcagagtttattatcggaaggtgagcagcacagtgagtaccttttcaggatgtggagaaagggcataggaacttttaaccaccaggaagacacatatatggggtagaggaaaatggttgcttaatttaaaaaggaaaaatatcagtatatcttcctcagggttaatttttgggggaaagactggattcaggcatttgcacggatgcttcttaaaaaggaaatagtatctctttcatctagaaacagtctctgttgaagagtgaagaagtcagtaaaggaagatagaggccccaacttgcctaggattttggcagggcagtcagaatgttgcacaagacactaattagcagtgatctcaactctagagacctttaaagtataaagcaagagaggaagctgagtgatttataaagagaaacaaaccttcatagcaccatgtaaaagctgagagtttcaatggtaaggatttttctactttctaactttttgcatttgactaattttgtgataaaagatagacaaaagcccacacacaaaaacaactttttaaagtaacaggaactgcttcagcgtaaataaaaccatcttcatgaccctgtagccatctccgatccttatcgttgtacaaagtagcaataccctcgatcatttggcagtaaggtgatatgaatgaatttgaagcaggataaactgcgtgggtgaatgtcaggctgaagcataacacacagagaacatctttcataaacatgatgagattcagaattgtaaataaacccagagattaattaccactgtgacctgcctgaaaataatctagaaacatgggtgtcatggggcattttccttccagtgttttattataaaaaattttaaacatacagcaaaattgaaagagcctggggtattctcatctggataaaatgaatgagtgtaatttatggatttgaaggaaatgaaactaggtgaacacattattgaacagaatttcatgggaccctgcatgaactgtaagggcgcctgaagtctcagtgcatgtacggtggccagagaagaagccaaataggagtgaagggacagtagcctaatgaagaaggagcccagcgtgtattccagaccttaacgaagcaacaaggcctgcacgtagacaactgaaatgcacagatgggagattaggacgtcttcagaaagacagtccttacttgcaagtaaaaatgtgttgtgtctcgtccccctcactgaagaaaagtaagatccttgaaattctgatgctcctcactaaagtagttttcttttcccaagagagcaatcccaagactaggtcaacgttgttccctcattttaaatgatttgccttctagttatgctcaacctgttttcataaactcagtctggaaaggaccagaagcttggacatcctaagttaagtttccatcatagtcacctctttgaatcacatccagagtgttcatgtggaatttaaatctgattagggggacataaggctcaaatatgtgactccatggttaatgagcttactaacggcagccgccttctctgtaaggattacagctcttagctgcaccgtccggccctgccctctctctccatgggtggtggtgtgctagcatttgctgtggctttataaacataactctgaagttaaagctagatgagaatgatgtttcatagatgctataacttccatagatgtgtcagccagtctgttttgtgtcatctccagtgaaggttgtgggatcacagtatccgtttgcaaatatgtggacacacaaccacagtgttaatgttgttactggtagatgttgcttaggggctccagccttcgcttgtcttggtcatgtggtatatccacaggacagaccctttatattaagacgctttcacagcagataccattagaattaacatttttataaaacaaagtgacttgattttgctacagcttaaaatatctttttactgtgacctcaagctgcactgcccattgtgatggcctgtcaccatgtgtggctattgaagctactcagagttaaatagcaagatgataaaatcattttaaaaaatagaattaaattaaaatgtagttgcttattcactgtatcgggagcaacatgtggccaatggctgctgtaattgacagcacagatacacatttctatccactcgggtagtgcttgcagaggcttacctgcagagtgaaccacacatccgatcaccttaatttatctatgactttaggccttctgtactttgataataaccaaaaataaagtaacagtgtttgtatagttctttaatatttagagaaccctttaacatgaaatctcatttcatccttaaatcagcctggtggagcagatgggactgtagtattattgtcctgataatctgtatggggagggatttggccatgtttcccaagctagaactttcgctgaggtctatggctaggtctttcagttcctgacataataacaaactgtttcacacttgcattaatattcttataaaagttcacttcccataaatatttttagaattaacatttattataaacatgacatagatgcaagttctaaatctaggaaatttccgtccctttgtctcctaagtccagcttagtgcctgtgctcagctgaggctccgtcaagaggtggcgggggtgagagatggatgggagtgcagttcactagcttcaaggatcccagctctggttggtgggacccagaataggcagaagaaatgagtggctcccagattggaggccccctctcagcagacagggagtagtagagtaaatgcttaggaaaagcaatctgttaattatttatccaagttctcctcttaaaagctatgtatatgaatcactgttcccctcctctgcttgcctctgttttgcaaactgggtgatccaggcttccttcatcatttattcagcaacactttcttaatacgaccattctgctcagcttcaggatccccagatctgaagcaggctcctgatctgaactgacagagcaacatttcattctttcgcactctcctgcctttatccccagtcccccagatgctttgtgttcacgtattttgatctagggagcacttaaagcatcagatactaagacagctgctctgatctcattagactgcagtagccaccttctgtcctcatctcctaagtgtcaggctctgtgctagacatgttcccccagcattgcagtcccaacctgggttactcaggatggtaacacatatgtgtgtgtatgtgtatcagagtgagggaagtaccagtcccccctcgtatgatatcattgtcatattagaagcttttctaagaggttctgttatgaaggtacctgttgaatttcaacaccaaacttgacctcaggatgctttttctttgtggagtatctgttgacaccctgttccctgttccatgcatctcggaacggggattgctgtgctggtgctgttggtttcacaccctctgggcgttcagccttttggaaaacaatcaggcctagagcttggtctgtggagtctagggttgtgtcttagaaataaagaacagaaaaatgatgctgtgcaaaaccctctgtaaaaccatggctaggattatttctatcatgggctgttattaacccagaaaaagggcagaatcctttgtccacaaggttttcatgtagcacaccatccttccctggctatatgttttcagagaagtataatcagtgccctctcaggatactttaagaaattataagttagttctaattacaggaatatgtaaaacttcttgaatgttttttctttattggttgttgcttcaaaaattggagtccaatatactttaatgattttgatatagtgatatgttaatctgatgcttctgttcattacattatgaagtattatataactgaaatgtgtttccaccatgttctgtcagaagcgttttgatcttaagaatacgttgcaactcctcttggttttgggtgttctgcagtggccattgtccaggagcgcttaattgctgacttagacctgatgatttattaatgatgatggttaacctcaatcaatttgtgtttgaaaaacaataatttaataattggtattaaatgcaatacaggaagatgatagagtgaaacagagctcaaaaatactgacaatcatctgacctgaccaaattgacatttatagaacatgacacccaagaaatactcagttgacacttaatgccgtatgaactggcttcaagccgtaaggtctgcatagatatttttctgcactcaacaataaaaggatttccataaacagttattatttgggtgacttgtctattttaatgtcctaaaaataaactgggagtttgttcttactatattttaagggaattatagcacatttctttctggtcagttgagtattgcatttcaaatagtcatcctctgcattccctgctaagttaaaagatgtgtgaggaacaggagtaaagaggttaaaaccgagggaaatgtgttgatgtctgtttggcttaattgaattagcttttttaattgggccttccgcacttgcctttcactcttaactgtgatggatttcgataggatctccctaggaaatttggcagtgatttctcagctgttgatgatcctggagatggagggtgtcagtggaggagattgagccagggttgggatggctgccgcaggaccgttgatgatcctggagatggggggtgtcagtggaggagattgagccgggattgggatggctgccgcaggaccgttgatgatcctggagatggggggtgtcagtggaggagattgagccagggttgggatggctgccgcaggactgttgatgatcctggagatggggggtgtcagtggaggagattgagccgggattgggatggctgccgcaggaccgttgatgatcctggagatggagggtggcagtggaggagattgagccgggattgggatggctgccacaggaattgatgatcctggagatggagggtgtcagtggaggagattgagccgggattgggatggctgccgcaggaattgatgatcctggagatggagggtgtcagtggaggagattgagccaggattgggatggctgccgcaggactgttgatgatcctggagatggagggtggcagtggaggagattgagccaggattgggatggctgccacaggactgttgatgatcctggagatggagggggcagtggaggagattgaaccaggattgggatggcagctgcaggaattgatgatcctggagatggagggtggcagtggaggagattgagccaggattgggatggctgctgcagaactgttgatgatcctggagatggagggtggcagtggaggagattgagccagggttgggatggcagcctcagggctgttcgcatggctcaggcttttctcatttgcctgcaaattgggaaggatgggaatgatgcccctgcctccttaagcctttcctaagattcacagagaagttcaggcccctttttcttggtctccttttaattctggtgtcaatttcctttgaaacagtagcggaatggactggctgctcttccttatttcacataaatgatttttagatacctggaactttttcattacatctcaatgaaaaaggaaaggagtaaggctgacgtgtagctgcaaggagaaggagcatcctgctattgagccctagttaaggggcacgtggaggagtcatctttctgtcctcccttgctaggagtgcagggcagttagaaacgtggattcaaaggtggactgggagaatttactagaatgcccaaaacagggctgcattgctctaggggcacacccagacctgggcagcagtcagttgaggcattcatctgaaatgtggattcctcggactcaccccagtcctgctggaactcactctgggattggagtccaggagtctcatgtgagttgaggatgccatttgagatggagagtcaaccatgttaaattcttaggatctccctcaagtcccctaattttcaaaaccatgttaaaaaatgtccacttctcaatataaattgtcattgatagaaataatctttttttaaccttccaagtatatgagcaacgtggattcatggtgtaaagcttgcggtgaggtagaccttccctcagagctgcaggacctagaagatgccattcatcaccaccagggaatatatgaacatatcactcttgcttattctgaggtaagtggccagttttacttacattgcaaagcagcatcatttttgcatcatagtacaccggaagctagaaaaaaaaaagttttgggtagcccagaaaaagtttatagatttcgagttagactgcagtttaattgtttagcatttgaacccctgtgtgtgtggggagtggggtggggcagtaggggaagcagaatggtgtgcaggcagtagcctttccgatagagcgcttatatgctcagctgctacagtcaaggaaaacctagtctttttttctacatgtatttaagaaatgtgtattttgtgtgctcttcagtctagtcaaactcaatttaatcttcccaaatgaaaccttttagagaagatgggctagattgcaaggcacacatgtgtctattttagaaatctaagtgtaacattttctttattactttagggtgtattacattatttacttagtgaatccctgttttattttctgccaccttctatgccagactgtattgtaaggactttatgtaatgactgacttaatgctcacgtactgtatctgttcctgctgttcctgctgaagaaaatgagtcacagagataaatgactgcgccaggtcagcagctagtggagcagggttagcccaggcaggcaggctgcatgttctcagtcaccaccctctgcggcctctgtgccataccacgtggtagctgcttgatgatgcaactttagatgggttgacgagtaccacccttgcccatgccttgttcctctggcccttgagaccagcctacctttgtgataatagttacgttcctggaggtgaaggcgaggggtgtagagaggaattctgtgtccttacttttctgcaaggttttctccctgagtaagaagcatctatatctacagtgttctatgttaatatgaaagattatcgcaaggcttctgtaagagtttcacagcacctggaagagtgctggacagtgtagatgtttaataaatgctttctgtgtttaaatctaaatcttgatccaaacacatccaaacttgtcaaagttgttgggaagaaagtggccatttgcatttcattctgatatttcctgttgtgcttcactgcccagctgtcactctcatatccttgggcctgcctgtcttgacatcctagtgtccctgagcgaattaaatggacatgtgatttgctgctacagttttgtgtctcataaagatgttttggtcagtgatggactgcaaataagacagtggtcctataagattataatattgtattttactgtactttttctatgtttagatacacaaatacttagcattgtggtacagttgcctacagtattcagtatagtaacatgctgtacaggtttgtagcctggagcagtgggctgctccctatagcctaggtgtgcagtaggctgcatcgtctagctttgtgaaagtctacattgtgatgttcacacaaggacgaaattgcctaatgattcatttctcaaaatgtgtccctgataccacgtgatgtctaactgtatatttgcttcagaatgtgggcagtccttctctttcccgtggcagttggtatttgtttgtttctttagccacctttgcctaataagatacagttttttcaagtaacatttcgtgttggctatggaattaagaaagtcaactctgtattgtttcttaattttgcaccaatgtttcttaactaatttggttgtctagtctgttagaaactatttaaataagtgatagccttttctatagtaaaactgaaaattgaacacatttataatttttttaatcacattggctcatgaggattatgtcacttctaaaaaccatcaagttctttcccgtgatgtgccatctctatgcattgtctaattttgacctataacacagaaagcaaatgaccctgttactcacacatgtaatgaggcctccactcatctgcttatatgaatctcttgctttggagctgttctttgaatgcagtggtgggcttgcagccagctgtctgcatgcccttgcccttgccaaaccaagatgggcttgaatagccttcatttacaaggtgattggcagaccctgggaatacagtctttgtgcataacttaaatcagaatcaccttgacccagccagtgtcatcctccagccaagctggctctttcagtctgcttgttgctctcggcagttttcattaaatacagaatctcctaattgttaccagtgcattctataaaaatggggcatcttgacacaggaacttatgtttacctgtggtatagttttatttgatttacattggtaccagtatctcaaaataatttgataggaagttaaacagcctctcaaactgaggtcttagatggaattttagcctaagaacatgtttgcaactgagctgtaaactcaaggagacagtaatttgaactggatgaactgaaaggattttcagtagaacagaatgaattattttgcctcttaaattatttacattttgaaatagtttcagggctacaggaaagtggtagaatagcacagagaactcccacattgcctcgacccagattttccaagttgtagaatttcactacgttgctccaccctctctccccactgcctctctctccagtcagcaaagcaccattgatacaacatgaccatcatctccacagccactgatcctatttccccaagtgttccaatgatgcccctttctcttctggtctggggcactgtccagcaatgtgcgctacatttaattgccatgtcttaccaatcagtctcctttaaaatggaacgttctttagtctttctctgcctttatgtctttgacatacttaaagagtacaggcctttctttctttagatggccctctacttctggttgcccccagttctcgtgggctgactcaggctgtgcctttttggcagtgcatgtccttctctgggtgtcatcacagtggacagaggatactgacctctccggctatgagtagtgttcatcttggccacttggtcagattggtgtctgcagggtttctccaatgcacaggcaccatttaaaaaattagtctttgctgcacattttgtgggcagctactctaatagaataccagtctctgtttctcatcagacttctcacagccatagtttccactgaggatttctgcccatagcagccaccactgtgatgatgatcacctatttccattattccttctgtatttattaggtggctttctaccataagaatgagctgtatttcctttctcttttgtttgtttatatcagtatgaaagtatgagatcttactatatcagtcggttataatttgatactcttttgattcctaaattgttcagacttggccagcaggagcttttttctgtgtctttttgatatgtccttattgtcctttgagcacttgttcccagctcattttgtactttccctgcctaccctgggatcactcgtctcactaagtgggatggttccttacagtattgtatggtgtttagaattttaaagacctgggttctcagagttttgtttgtttgtgaggtgtcactgcttctagaccctcttagcagacagacttatgaaacatatgaatgccatccattcacccatccatccgtctatctctgcatccatctgtccacctaaccacccgttgttcatccacccgaccacccatccatctacccaatcacccaaccacccatccatccatccacccacccacccacgcacccaaccacccattcatctgtccatccatccatccattcagtcacccatccatccatccatccttccatccaaccatccatccctctatttatccaatccccatccattattccatccaaccaattacccagccacccatccgtccatccatccaccctcccaacctccatccatttatccatccatccacctaatcacccaaccacccattcatctgtccatttatccaatcattcattcattgatgcgttcattcatccattcatccaaccagtcacccaaccacccattcatcatccatccatccatccatccatccatccatccattcattctcctaatcacccaaccacccattcatttgtccatccatccatccatccatccatccatccatccatccaattacccatccattcatctatccaaccaaccacccatcctacagccatccacctacatttatcaatctacccatctacccatatccatccatctgccgtatcactaaattgcccatccattgactcagtcacccaaccacccatccacatttgtctagtccatctgtccatccacccagtcacccaaccacctatccatacacccagtcacccaactgtccatcgccacctcatcacccaaccatccatccacccacgcagtcacccagccactcagccactcattcatttatctatctacccaccacttacccacccacccacccatccacacattatctacacatgcacatacacatccatataaaattactgctgtatctatctgtgtctatctgtattaaaaatacatgtgtttgtgcatttcgaatccaatacctcagggttctttccatcctttccctttctaagtttgttaatctattctcaggcagcaagaaacctggcttctattttccttaatgtattaacttacttgttcacttggtgtatttgctccatttcccaaccattctgtctgggttctccacctccaactcctaccacccactcccttaacctggcacagggacacctcttttggcacctccacccctcacttcctcattttcttcatgccaagagggaaggtgtcaggaagatgggaagggaaggactgcttttgttttgtaagtgatttttattttatattcctaaatcagtggtttgcagacttgagtgtcttggcttaaaatgcagcagtactctaccccagagatagtgaatctccattttcagaggccttccctagttctgcagtgactgatgccaatggtacacagatcacatgctgagcagcactcctgagcttgctctgaagagctgggggtctgctgaggaggtgtccatctcacagatacggagcccctgctaagtgctagacattgaactggatgccgggtcatgtggggttaggagtacttataagcagggcttgctttgcttttttttatttccttttccttgcctctctcttcctgtccttccttattccctttcttctctcctcctctcttcattttctctacaattttttttctttgaacagggtttatagtttctagtctctgatcatataaatttgctttgggaaactttcccagcatttttcttccaagacgcaagcacctgctctgctgtgctttaattagacctgcccgtgtcactcctgtttgtgctttagcaacaggaacgcacctgggcctcctgaacactcacttgcttcagcttgccagctctgagcttatcttgttggctacagttgatcacaagagagtgaagcagtgtaaacgtcggagataagttgtagtcatttttaacattttaagtaagccaactcagctaccagtttttcaacaaactgaatttataaaaatgattttcatctcagtgtgcctgtgttgcctcacaagcctcaatgccaggtgtttggattgcaaggtgagactgcatagtaagcagccacacatccaccaaagggccactgctgcagccacggagcacaagcaaggcgaagtgccatggggcgttggcctgctggatctcatgtgacttcagggcttagattctgcatccatttctcagtttaacaaatgtgccaacttagtgtgtgcctcaacagggcctcatgggaatgactgatttgctgcctgcaaagctggttgagctcctgtttaaaggcactgtatcagtgggtgatggcagggtcagtgctattagcctaagatgaaaacacacagcaaaatgagtcacctggataggaaacttcttaaaaccaaaaaaccacctctccgtgatgtgtgtggaagctcagttcccttgcggtagagtcacttcttttttggcagagtggagtcttcttctgttgcccaggctggaatgcagtggtgcgatttaggctcactgcaacctctgcctcctgggttcaagcgattcttgtgtcttagcctcctgagcagctgggattacaggtgtatgccaccaggcccggctaatttttatatttttagtagagacagggttttgccatgttggccaggctggtcttgaactcctgacttcaagtgatccgcccacctcggcctcccaaagtgctgagattacaggcgtgagccaccacgcccagctgtcacttccatcacagttgtataaagcctcattaaagatcgcagtgttgctgtagcgacatgcagtgctgtagtcagcatctgccatagtatcagagccaacagcccatatgacagctgtcttcttctcaccccaaactcagcttgaggccttgcaagcacttgaaatataagagcagcaaaagtagagcccaggtgcagcctatggaacacacatgtcaggcatatggaactgactcacgccaactgggctgctccagacgtttcctgttttggtcttattttggtttttcctttctgataatcccaggtttacaggtgtcagagagtcaaaccaaggtaaactgatctggttttgaataagaaactgaatagctgaaagaaatagaaatcatcatttggaggtccatccaataagaactttgcctggagaaggaaccagctttctctgtgttctccctgaagcatgggaaagtatctgtcgttgggaacacacatgacctttcaggaggtaattgacctgcactgttggtaggagcatcttatgtagccatctgaagacagattggaacctccttactcagaagggttcgattgtttggccaaggaatgtcaactgttgctgcagaataagctgggtggttacctgctgaccccttttcattcttttctgctttattagaaccttgatatgagaataagttcagcaagagttggagaggagagtgaaatcattcccaggcttcgtgtggaggtctgtgctttgcaggccatggcgagctaagcctgaaaaagaattaagacggtgttggctttgagtcggcagaaatagtgcaattcatttcataaaagttttgaaggaacactttttctttattacaggctaaatgtcttggtgtattttgcctgtttttgttgtatcttgggaatgccattttctagcactttttagatctaaaacactgcgtttggacctaattgatatgctgtcactcatctttatttggtctttgggcagttgttgcttttgcagtggtaagcaagaatgtctagatgctattgtctttccttaggtcagagccacgttcatcccttgtgcaggtgaagaatattcctgctggaaacgctcagccctcatctgattttacaggaaacgtagagatcccagtaccagaaacaagaataggcaaatctctgaagttttatggctctttttaagggtgacatgcagaaatccaagttacaagtctatgtgcagttctgatgaacagtaaatattcaagaagcagcccattgttctacattttaaatagttatactaccttttaaatattaggaacaaacatatctttgatatggtaaaattttaaacttacctttaattactttttctgctttagttagtacttgcatttttctgaactcatttggatatcagagcattttagtttctctttataaaatgttaatctttgtaatatgtaactttgattgcccttcaagttccccagctgtgtattccaagaaaaacaaagagcagactgaaaaatgagctgatctgatcggttcaaaaattattataggaaagtcctgctatttaataaggttgattttctttttgcagctgttgtctctttgtggctcagagtttcagtgcctggaagctgaaaacagagttttaaacaaaatgtataactgaagtaaattcactcacctggttcagtagttaagaaactgtggaactacactacatgccataaacttacattacttgttttagcacttacattttatatgaatttttttgtctgctctatatagtctcttctttcattaattttctcctggttattctgtaccatttaaaaattattatctctatacaacagaacagcagtcctcataaaattgtagcatgttgtttccacataatattactgtaattacaaagactaagacattttgccaaaagtgaaaactatatatgccatcctttatgtgcttaaatcatactttttaattgccaaatctacaaaacttgtactgaaataatatagaatcatatttggaaaggtttattggcgaaatgctgtttttgaacatggatttggagttccatgctgtctggttttaaagtgggtccaagaggtgttatctcgcccagggtctttactgccgctgtcactatcagtaaatgacagtaccagtggtgggaccaacagacacattaatccctgcttatgaattctcagaaggtggagctttccttaatgagttgttttatgttaaggtatttgtgtattgactttctcagcagacatttcccactacccctccaccgccatgagcaagtgtgtccttcgaaatccagtcatgatctctggcatggagatctgttaaacagttgcagagacactcaaggaaagaaatattgcatggaatgttgttgcttagagtactccattctcagtagaagaatattaatggtgtcacagggatgagttttggaaacttgctgagggctgggaactcatcttgtccttttgcatttggtggtttaagttgcaaaacaatggcttaagatggaaattggctttctccctgtgtaaaagaaatccaaaggctgtcattccagggctagtgtggtagctctattagtaagaggatctgtggatccttctgtctttctgtgttgccttttttagcaggtaggctgctgttcttaagattgcctcagagtcatcaataactgctaaagctccagctatctcattcaagttcttggcggcaaggaggaggaagggacaaggggatgagcatacctgccagcttagcccctaaacagctttcctggaattcccattcaacattttttacttttgtatattggccactcatatatgtaagcaaggctgggaaatgtggcattacagctggagtgttgctgtttctgactgtaggggtttggctatcaaggagggcaagtggactttggggaagcagctgtcagtttctggcacatgttcaccaaatcataggctctgatgtacattttccaacagtaatgcaaggagtaaaatgtagaggaaatatttgtaaggaattctttttagggttaacaccatgtgaaatgtatgacttggagcagtagctctcagttctaagagatgcagcactccaatgatataacacaaattttatgacacctgctttatgatcctgaactaaaatgcatacgtagtttaatctacctttgcatataatttatatgtgtacataaaaattatatgctacattgtaagttggagacaaaggtgatttatgataaaatgtttttcagtctataaatgcctaaatacatctattgtaggtgaaaaaattagatattcagatgctggtcatatatataaaactattgtgaatatagcaactacaactgtagcctggtcatgtggcatcttggtgatgcgagtattgagaatggttttattgtggtcatgtgatattttgaaagggaaaacagctcttgtaaagttccaaagaaaaccaaacactgtctttgattaacatggttgttggatttgtgggaagatcagtatgttaaaactgggcaaaagagaaaaaccgtgtatttatgtgttaaaaacagccttgcctagatgatcacgaaaagcaggacatttcttcaccatgtgctaatatcctgctcatttcagagtaccctgcttctctgaatccaccacccaaatcaatcatggtgcctcctctcttcaaaatctttgcatcagcaatgtccacaccaatttcagtgacttctgggcacaaatgagaagcctgcttgagaagactgtttaaattttccatttttgttttaactgacactaattcagcagttaacttggttggtttttcctttattatctttggttatgtcagctgagctgatttcctcccaagttttgctgttaggctgtattaagtgaattttaaaccctgaagccttcgtaaggaataatcagcatttccaacgtctcaaattcaggtattgaaaagtaaacgtgttacaatctggcacaactgcagttagaagaggattaaaggaagcgattaggaaattctgcagggtcacttgccaccaggttttggtttaaaggctctcagtgttagcttttcccatttacctattccctgtgtgctcttttttattctaagggtttcttctaaactgggcttgtgtctgttaaaagtgcccctgaacttgctcctctttttttttttttttttgagatggagtctcactctgtcgcccaggctggagtgcagtggcacacgatctcggctcactgcaactttcatctcctggggtcaagccattctcctgcctcagcctcccgagtagctgggactacaggtgcccgccaccacgcccagctaatttttgtatttttagtagagacggggtttcaccatgttggccaggatggtctcgatctcttgaccttgtgatccgcctgcctcggcctcccaaagtgctgggattacaggcgagagacaccacacccggcctgcttactagaaactcaaagaggtttttagatttggaagtatctaagctgaaggatcatgtgaagaggccctacctacttaagacacctgcatcccacacctggttaccttatgcatctcacacacactttgtgttgtctgattgtcactttttttccccccaataacatctggcgtaattaattactcataagtcttatgaatcacttttaagtaggaaaaatacataatgtttttctttctaaattgcaccctcaccttttcttatttctttgattaacccgaatactttcatttaattgtagtttgagaataaattgccataatatagcacttgatggcattttaattaaaactaccttttaaagttaatgaaccaaatagaatggcattttaaattttcttttgtgaagttaaattgctctccagctatgtcagaaagtttaagtacatattctatgcctagtgctagattgatttttttgttttaactgaggctttaaggaacaattttgttccattgtgatgatctgctgtattctctttaacatgtctcgagataaaattattacttttaaattttaatttgcagatatcccaggaatgcagtttctgttagttgatttatggcatttaaggcaaatagtatgcctattcattgagtggtatctactacagtgttttgtagtaattaatgttcttttattttcacctagtgttttgcatcatttggctttgtgatgtcattggatagctgatggattgttttaaattttatcctatataaaactgcctctgagtaaaactgtggtgtgtgaatgaatgtctgggcatgtgtgtaatgtgtgtacatgtacgtgtgtgcctgtatgtgcacacacatgtatccaaggacagcatctgtggcacagcctaggccaaacctcagatcgtgaagaatcactcatttcttttgtgggcaggtcagccaagatgggaagtcgctccttgacaagctccagcggcccttgactcccggcagctccgattccctgacagcctctgccaactactccaaggccgtgcaccatgtcctggatgtcatccacgaggtgctgcaccaccagcggcagctggagaacatctggcaacaccgcaaggtccggctgcatcagaggctgcagctgtgtgttttccagcaggacgttcagcaggtcagtttcgcctcatgcccttctgcatgggaaatggcttgtgttgagtagagtttaaatacatcatcatattgggaagatctgtgcttaaggagtgatgactagaagataaggagaggagcttttttgttgaatgtaagtgaaaactgggcttaggaacgcgtgttcaggctgctgtcagccagtagctcctgtgcacagaacccaggagaggatgtggggcctacactgggaagttttcttctagaatcggatcattctcatttatatttatttgtgacaataatgctggtgtgctcacaccagtgtattgttataatttagttaacacttgtctgcttttccaactatgtaaacagtgaggtggtcatgcttcacttcccacgtggtaggtagtgcagtccatggtgcacagtaggtgcattataattagttgtcttgttgatgaaaagtacacttttatgactattcatttctaagcagttgccatctcttttgttttaaagaaacaaaaataagagtaagtccagttccccattgttttgcttccttattatagaataagagttttaaggattaaagctatgggagtaaaatatgacatagctttagggataaataagatgatagccatgtccttgcccccaaatagagggaaagacaagggaatgaatgaggtgtcacctctggggaggaggaatcctggagtatgcagggtagcccatggcctcaggaagttggctgggaaccgccgtgataagcctgcagtagagccactctcaggatctcaggtttccatctccctgagtgtcatgtgaaggtgagtgagttttctgctgaatgggctgggaatttggagagtcgccctgtgttctgatgagactgagattctctgtatgtcattcaccatcattctcatcattcttcacttcatgtgaatctggtaaattcaaaagacgttgaatgggccaggtgcggtggctcacgcctgtaatcccagcactttgggaggctgagatggcagatcgcttgacgccaggagtttgagaccagcctggccaacatggtgaaaccgtgtctctattaaaaatacaaaaatcaggccaggcgaggtagctcacgcctgtaatcccagcactttaggaggccaaggggggtggatcacctgaggtcaggaattcgagacgagcctgcccaacatggtgaaaccgtgtctctactcagaatacaaaaattagccaggtgtggtggcgcatgcctgtaatcccagctatttggaaggctgaggcaggagaattgcttgaacccaggaggcggaggttgcagtgggccgattattgcaccattgcactccagcctgggtgacagagcaagactccatctcaaagaaaaaaaaaaaaattagcctggcatgctggcacatgcttgtaatcccagctactcaggaggctgaggcaagagaatcacttgaacccaggaggcggaggttgcagtgggccgatatcgcaccattgcactccagcaagactctatctcaaaaaaaaaaaaaaaaaaaaaaaaaattagcctggcgtgctggcacatgcttgtaatcccagttactcaggaggctgaggcaggagaatcacttgaactggggaggcggaggttgcagtgaaccaagatcacacaactccacttcatcctgggtgacagagcaagactccatctcaaaaaaaaaaaaaaaaagactgaatggccctgtaatttttaattttcatataccgtgctttgattctaattttattttttgagttctctgaaggttacatatacagagtgcttcaggaatgatcattttgttattattcatgcttcttaacaatgttgttttagtccaagaagataattgccagagaaagaatacagtgcaggaaagaagaggctggagccagtggtgaagagggattgagaggacagacattgtgggaatgaaatcatgaataatcgtgtttttgaattgtccaaaaacttctacaaaccatgaaatgttggagtttaaatctaattgttgaaaaattccccacattccttgtatcccttaggttgagcataattccacatccgtggactgatgcacttcccaagagggggcctcattaactcttccgaggcagcagcagcaagggcaccccctcctttccccccacaccccatttctcatggctcttctttctctcatctcatgcttaggttagaaaagggcacaaggtaaggaagcccttgggaataggctgaatctggctatctaatttggtgccaaatacttaatgtgcttgaatttaaaaacagcaaacatgtagaaaggtaattataattatgaggccagttctttaagctagctttttttcccctctcaaacagcatattggcttggatgtcagcaggagaaagtgttttttgcaatacacataatgcatatatggtcctgttagcaatctatagaaaatagatattgctcattaaggtaaatatttttgttgatgaatgatctggaatggtctggacttgttgtgtgaacaggaaattgctctgtaggctttgacttgtgaggtaaagagtgaggctggtaagattaattaaagtaaatactgtgacaataggatgtcaaaaccaaaaacgtgtttctgaaactcaaggaattaatgacacatagggaagtttttgccatattaagcatagagtaggagaggcaagtcaagaataaatgaaagaaaaatagtagtactttagaaggacgttaccagcagaagataaatttgtaaagacagtagtaaccgaaatccataaaaacatagtaagccggttagagacacgacagtggttttcatttgattgttttgagtgatgcaaaagcacctgtaagtacattgagaaaaaggaagagcaagttactgaacaataggcgaggcatggaatgattacagttttatgaaagtaaccccagaggagtaaatgcttgtctgttgaaaaatatttgaaggagcaaatatgtctattagtgggccctgaggaactgaatggggaaggatgacagagggagtttggtttgtaaaacatggttaattttggtttcgaggttaattttttcccctcttaataagcgggggccaattcataacttctgtgtagaaggcattttggatggtagtcaggcgtggcgggaaaggtggttgaagctgctgtgtgtagcacacttaccgtgcttccaatttagagctgggcggggaattgggaagacctgctgaggactttcccagatgcacatgctggctgcctttgccattgttcacttaaaaagaaaatggaaattttttatcacatttcctaatgatcagatatatacatctctccattgccttatgtttattatcagagtaactctcagcgaaggtttggttgaatgaatgaataaatgaatagctgtgttactgctacacactgttttctagtttagagtatgctttagttttctctaggaaggtaactcatttttgctttacctgttcagatgggtagtagtagtccaaagaggatgccatcagacttgtttttctgcctcaactgttcggctggcgtggctcttcttggattgttgagattcagttactctagcatgtcaggagcagtgagtggccccatgtgtttgctttcctgaagcctactgagtcccctagaggaagcccctcagcagggatgccttctgcaaagcccccgtttcccccacagcccttcatgtgtgagcgccacccccttgcaagtgtctcttggcaggaccctccagggccatgttggaccattttttaattaatattctttaaaaaatgatcaggcaaacctagtccactctaaattcttcttgtccagtctttattctttttttctctttccaaaataccttaattgaatgtgcgatgctctgaaagtttcagggataaatatgttgacagggtccaagttccttttctcaaggaatttataatctgataagagcagattatttttagcagatagttttgtagtctactaaatttgactgtgccaggctcatctgcaacactcatgtctttggttattgtggagtataatttgctaaggcataaatttgaatcctccttgtcaaggtgctatcaggagtgaggggtggatgaaacttgcgacctcttctgtggtgtctgattgccttgcagcatacacattttgatggggcatatctacacttcagtgatttgtgcaaatttgagtgttcctgagagctttttctgaattcttctcaaacgtcaagggtctaatgcacaaggaaaaatgaaaggtcctatagtagaggggcaagtagcagctatcatattgagggctactaggaatatcttcgtggaagaggtagagtttgagcagctgtttgaaggatgaggagaaggtcagtagattgaggagtgggcaatgggaattccagcaagagtaggacagaagaggcaggacccatccaaggagcggcaagtgcctagtgtggatggagaggtatgaggtggggctggtgccagcaaggtaacatggggtcaggcacagaaaacgtggcccccacgatgagggttttgggcccctgttgaaggagctcatgcttacctgcgccgaatgccagtgcatggtgcaagggctgtgtgtgacttctgaacagcatcaagctcatcttggtgctttgtgggtgctcactgccatgtatgtgtctttcctctctgcatgctcacagctggcccattgaactttacccatttcacctcatagagttcaaagcccgaaggatctcctattctgtgccttttaacttgatgctgtaggcagtggagggtggatagcaggagtgaacctaaaggccaggaacctggttaggttcccttgtggacgcctgatatggtttggctgtgaccccacccaaatctcatcttgaattgtagttcccataattcccacttgtcatgggagggacccagtgagaggtaattgaatcgtgggggtgggtcttccctgtactgttctcgtgatagtgaataagtcttgtgaaatctgatggttttataaatgggagttcccctacacaagctctcttgcctgctgccatgtaagacatgcctttgcttctcctttgccttccaccatgattgttaggcctccctagccatgctgatctgtgactccattaaatgtttttcctttgtaaattacctagtcttggatacgtctttattagcagcatgagaacagactaatacaacgcccctgcaagtcatgggtgagtaagtcttggagagtaagaacgtgaggaccacagagacagccatcagtgtttcattcactggtgtttcccaagtgtctggaagagcagatgtcagtatttgttgaatgactgaatgagtagttgaaggaatttaaggaattccccaattttgctaattaaagattctttggggttaaaagttgcttcatttcttttaaaatgggggagggttggtcttatatctgggagatctgcctgaaggaatggaatctttgattgatgttggggaactaggggtgtccaaggaaggaagtgataatttcagtgcatgggaattttggaagtgtgagatctctcatgaggattttggtcatttgaatgcaaaatgagggtcttttatgctgaattccatctggaggagggaagttggcatatgcctaagaggcaaagcaacacatcccaggtctatagagaagtaatttcacagatttgcctcaggccccagcctatttcttcggcctgcaaaagccagctctgcaggaagcctgactcaggagctctaggtttagcatcacctacactagacctagcttttaagtgaagtttgagttcctgaactcccttgtcatctgttcattgagtcaggagggagttttctgattccagtcatcagaatcatatagccctagctgtttaacacttgcttctgtttacactccagcactcgcagttttgattgtgtctcttaattagaatggctacaggattgccatcttctctgagttctctattagaattagggagtgctgagtggaggcacaggcttggttttggattgggaactactgggcgcaggtagaggccacctgctgatcttcctggtgggtctagagccagctcctaattaaccttctgcagtagtgagcacagaggaggtgggactggaatccagccatcataggaaccacagccaggatggagctgcagatttaacagtgagaggacaaaggctggggaaagggctggctccctcccacacacccctcatctaaaacatcttcaatgtcagtccgtggtgaatgctagacctcaaaagttcccattcttcccctggtccccaaagcccacaaatgtgtgttgaattctgtgtctgttttatttcacttttaaaagtagtctcacacacaatagaatttgaagctggagccccctcattttccaggtaataaaagcaagccttggaaaagtcgaatggcttggcagaagcaccgagaacctcttggtgttttttctgtgtcaccgctctgggtctgaggaggatgcctaccttctaagctaagcaaagagtaaaatcaacgtgatactgaagaaagaatctttgagtggtgcttttagtcacagggaacaggctttcctagaagctgcaattgcccgtgaccatgaaggaaaacagccacttaagaacagagagagagaggagtttagtcctttaggagggaatcaatggaaagggaaaaggagctcccatgaccactctccagccccactcagctatctcaggcctcccttgcttcgccgcatggcgattagacagctgggggtgaataatgcggtctggggtctccctgagcttggcctccgtgggagagggaaaaataagaccagtgatttcatgagtaaagtacgccagagcactaggaaagaaagtgtgagctagactaacacaggatgagtatatgaattccagtaaactcagaaggattccttcatttgtgatttttactttgtaggtaaatttcattagtagcataatattgactatccttacagcactgccaaacaccagcctttaataaaaattaacattatctacgtgaaagtcttcctttatggccacctactttggtttaaccgatctgaaatgatgttgcttagtcaatgagtcatcttttgttgtatatccctaaaataccattgatttgatagtccagaaagctcagaatgtaatatgttcatttctctatcagtttccccagcgatttaaataaaagacagtgactgagtaactaaaataaatggaaccaggttgttaattttggttttatagagaatgtgggctggcagggaggaaatctttattttgcaactggaaaaaaaatctgactttgtataaaaaagaacaaattcagagtattttagatttacctttgcttttcatttgtttcatgtattctttaaatggattatagaatcagaggagcttattttcatttttgtgtgcgtaagatgtgacttagaaggggttctcattgttttgacttaaaacacactaattcattatgtattgtatcttgagaacagtggctacagttgacagatgattatctattttctctgtgtgctctttggatgcagaattacctgtaaaaacaaactagcttagtatgttcttggttgctttatgtcagatgtattatgtagtttttcaagtagcaattctagagatgaaactctagttttagaaatattttaaagacagtatttacaaactgaagtggaatgtagtgagcttggagttgagaagacctccatttgaatctcttttcttgggcaggttacttatccgagcctcaatttcttgcttaatagaaataatgattaaagtctgctctctttttatttgtagcttttatttgtgattcagaattcagaatttctcaaagattagaaaagtaacacagtgtacaatactaacacttctagtggcatctggacagcccccccataatcaaatgcatggctatttctatagctgaatgttcaaggacttgcacttattaagtactcagtaaagactatgtaagtaccctcaggttaggttttattgacggatgaatttttagaaccaagttttgaaaaatatttggaatttcagagctttctgtggttgagatcatggaactgtattgccctcccaagcagagcatagaacagtcattcaataaatagagctgatggcaatgatgcgatgcatgaccatgatagaaaaccattctaggaagtatttgcaatcaacacctctgcatttcaaagggaaaatatcatttacattggttttcacatcgtatgttgttgtgaggtaggctttgaaatactctcctgtttgatgagggtttagtatgtgtttcttagtctgtgttgctataaaggaatacctgagtctgggtaatttctaaagaaaacaggtttatttggctcacggttctgcaggctgtacaagaagcatggcaccagcatgtgcttctggggaggcctcaggctgcttccactcagcatggaaggcaaaggggagccggagctgcgtgtacagaacacacggcgagagagaagcaagagaaaaaggagggaggtgctgggctcttttcaacaatgagctcttgcaggagctaagagttagactcactccctcccttgaggtggtatcaggccattgatgagggatctgcccccatgactggaacacctcccggtaggccccacttctgacactggatatcatattgcagtgtgggacttggcggggccaaacaaaccacagcagagagagaaagagagagagagaaatttttaaacaaatttttaaatagtaattactgagaaagaggaatccgtaaatactctacaagaccacaaatactgagtattaggtagtagggacctactacagaaaataattttacaaatagcttatacaggatgccagaactctgcagcgggactgaggaagcattacctgtggccagttcctgttgcatctaatcaagggttggtaactattcgcagatttaccctaactcagttttgctgagcgttgtgacagcgtcatttcctaagaggttacttacccaacagcctgaaccattctgaaacaaaagcagaggtctttcctttttcatctcacctgtatgtcagggcagaagcagtgtagacgggaggatgagccctgaggcaggcatcctggcttctagtgcacactcaggctttcccataaagtcacagagggccctgcctgtgtcttcatctgtaagaggatagggatcgccctacccctggctcactgtgaggatggatggctcactgcacacacagccttaggtcaggggctgcttccacagcaggtgctcagatggcgagatgattgctggtcaaatgaccgtaatcatgccaccatcacgttcagtcttgcaattaggaccttggtttccttttcattacaaacagggagttaagctaaacattctgaacagctttctgccttctgacatttgacttaggtgctgagcgatggtagctgtttcaagtgtgcacggtccactttggaacaaccgtgaccttgggactgttgttttgtccattagagggcactggtgtactgaggaatgagcccacaccacaccctctgaacagagaggaaggtggtggtggtctccagctttactcttctgcctctgtgcagagtagccgtgggaagggatcagcttttgtgtttttcatctggaagggaagcagcaagccccaggccagccttattgtctgtggagttgaggacacagagcaaatagataacaggactgtctgggaagggggcggaggtgcagctggctggactggatagataaaggcctgtaatttgcttatcttagtatgttttaaatgggaagatttcacaagcatgtctttaaaatgttacttagaccaggtatattgactcaggatcactgggtaatctgagtaatctacccatacttagaatcaacagcctcatggggagtttggttttgaatattagctggatttcatagctgtctgcaattatttattattattttaaaagtggaaattatcattggaatttgtacatattcctttgaattattttcatgtttattggaaatacgatttcacctggtatttacatttctgtctgaaggaatcactgttaaaagaaaaatgcccattataatcctgagtggttggtttatagcagcttttatttccaacttaaaacttcctaaaatacttggaaacaaatttcttttttatttttattttgttgttgttgttgttgagatggagttttgctgttgtagcccaggctggagtgcaatggcatgatctcagctcactgcaatctctgcctcccaggttcaagcgattctcctgcctcagcctcccaagtagctgggattacaggtgtacaccaccacgcccggctaattttgtatttttagtagagacagggtttcaccatgttgaccaggcgggtctcaaactcctgacctcaggtgatctgcccaccttggcctcccaaagtgctgggattataggtgtgagccaccgcgcctggccagaaacaaatttttattaatttaaaaatgttgtattttgcttcctctggccctttctaccaaataatgtttatcttttattttttgaaattgtgcccttatttcaagtctctatggactttccagtaatcatcaggtttgctgcttactggtgacttaatttttctctttacgtaagttaagtaatataccgaatatattatataatttaaaaaaaagtctccttagccctcctgtagatcttacaggcaggtgaactgtagcagaggtgttacttatgtacctctaaattcttttcaagctagaaatatttgatacttctcttttgcatggtttggcctcatgcccaggagcacattccattaaatgtatccattctcaaggccgagaggtccagaagttgtccttgagacatttctttagccgtggaatggacctgtgttttataatataaaagactgtgggacaaacaactcagcaacgctttgtctgcctcgaaatcaggtggtgaatgtagcaataccttataggactctctttttaatcccaagaaagaaaaataatgtactaaatacatgagttaaaataatatactcaatgcatgagttaaaataatgtgctcaatacactaatgtgctcaatacactagttaaaacaatgcgctcaatccaccagttaaagtgcacgcccaatacgctagttaaaacaaagcactcaatacaccagttaaaacaacgcgctcaatacatgagttaaagtaatgtgcactcaatacgttaaaacaatgtgcaagttaaaacaatgcactacttaaaacaatgagctcaatacgctagttaaaacaatgtgctcaatacactagttaaaacaatgcactgaatacgcttgttaaaacaatgcactcgttaaagtaatgtgcactcaatgcactagttaaaacaatgcgcccaatatgctatttaaaacaatgtgctcaatacactagttagtgtgctcaatacgtgagttaaaacaatgcgctcaatacacgagttaaaataatgcgctcaatacgccagttaaaacaatggactcaatactctagttaaaataatgtaccgaatacattagttaaaatggaatatgtacagcctgtgccgtcaggagcttgaaatgagatggaagcttgccatgagttctggttataggcggggatgccatttgccacactgacattaagatgcttgacatagaggtcatcgaatgctgacaactacctgtgactgtcaccactgggcaggtaaggaacctgaagctgagaaggaataaggaacttgcccaagagcacacagctaaattctatgtctctgtataggggggctggaaatggaggggtggaaatgagaccaggctcggcctccacccccaccccacacctcccacacgtctgatttcagtgcctgccagttctagaagggtctgtacagaggaccacaagaggtttgttaaggtctgcaatttacctgtaatactaactttgctagaccttgaccagaaaggaccctctgccaggccctcagatgtgaaggtcagtggtttggagcaatgaggaacatgtcaggctctgatactcaccagctgctgcttttttccccctatatctatgaacatggctgatctctctacagtacagttgatcaagggcaaggaaccacaagctaagccccttttattttgccattagcagagccatggctggttggcttcccagattgccccctagaccactgtctttgctgtgtgtgcccatttgttctttagtccaaggtgattttgatctgcatcgtctgaatgtttgtgtccccccaaattcatgttgaaatatactccagaagaggtggggcttccaggagggaattaggccatgagggcttcacccttgtgaatagcattagtgcccttataaaagaggcctgagagagcttgtttgccccttcctccatgtgaggacacatagaaggcaccttcaacgaggaacaagccttcaccagtcactgagtctcctggctccttgatctgggacttcatagtgtccagactatgaagccctacatttctgttgtttataaattactcagtctaaggtgttttgttagagcaggctgaatggacaaagagagcaccagagttacaacatgcaaagtatgagtgaaccttcaatactatagctgtgcattaacaaatatgtttaaatatttaaaatcttttaaagtttttagtttttagctaaagacatcactgacttagttttttgctggttatctcctatccatcaaagaggacaaagtgggcatttgatgtagtgtaaatgcagttgtccctcagtgtctgcatgatcgcccacatataccaaaacctatgggtgcctaagtcctgcatttggtcctctgtatatgtgggcttcacgttctgcaaatactgtagtttcagtccacatttggttgtggatgcggaacccttctgtacggagagccgactgtacttattttttaaaaccacataaaagtggacctgtgtatttcaaacccatattgttcgcaggtcaactctagtttgttagatattgtcagcgttttgtgatttaagtatgagacccaatgaactactcagttccaactacgaagtttaaaacataagattatactgctttgtttttactttttctttagtgtggtggatttcacctagcaagaacttttaagtaattaaattcatgaaatgcttagcttttgcagcatcttagtttaaagaataaattatccaagctcaagactgaggcatgtaagtgttaggttttacttcatgtgtttgagtcttctaaagaagagatggaaaaaaaatgactctgtagttaaacttgaattgccttagtagtgtagctttaagccttataaaattgctaagttaaattggccctgtgtgacttcctaatcactgtcttatacaatacccagtcagtttggtggcccagtggtgcatagataagttgagatttaatttaatcattattgcatgcaatgtttatacatagaaaggtttccacttttaatgtaagagatgattaaagtcctgctgggaaagctgatgtaattatcagcttgtaattatcgagtgtgttaaattagtatccaattacttcttcccatttttttttctcgtttgcttcttgtttcttacagagttttaacaacagaaggggtcttcattggataaccttaaacattgaacatggcaggacattgtttttatggcatatgtacctgtatttcattgtaggtgctagactggatcgagaaccacggagaagcatttctgagcaaacatacaggtgtggggaaatctcttcatcgggccagagcattgcagaaacgtcatgaagattttgaagaagtggcacaggtaaaacaatggcttctattattttatcccataaatacccgtgtggttgattttggattacagttttaaccacatttgagataagttagcattagctcgatgtgtttgacacctcagatgaggtaaaggctccgatttcagagtgaagttgtcattgcctaggcagaaacatgatttggtaagttgacgctttctaaaatacgatgttcttggaacagaaatgtgacttgggtgtttttgtcttgtttattataccagtgccttttgactactttgtgaaattccagtttataatcaggaaataacagttccttctgcgtttctatagtagtaggctaagccttacttgttctgtttgcatttctttaaatgtgtgggcttaggaaacaggagccgggagtccagtgtgttccgaatgtgggatttgtggggtttgagcactggccgcctgactttggacaagtcgcttaacctttctaaggttaactttctgatctgaaaaataagcccagtaatttatttaataagatttttcttatagtcaacttctttaaactagtgagttgtggcttgatgaagtaacacagcagagattcagaaaggaagtggtgaaatgttatggttgaattcatttaaaaatgtactaaatatagatttattatatagaacagttctggtgttctgagaaggaggaacccaaaattcgaacctcatgtttaggtggtggaagcgagtcatacagtgtaacttctgcagacacaagacctagctgcaggggccctgggtttcagaatttgttttagacacggctgcagtcacctcaggaagcacttggatccattttgcatgcagttttgcagagtcaagaacttcctcgtaactaatttgaaggtcctttccttaattttgtacagtgattgtgagtagctctatcctgttgaatgaatccatgctaattgatgtgtatgtgtggtgtgaatagccatcgtgcattttcatgggctagtgtaaaaaaagaaataaaaaatacttttcatgcgaagctttttgcaaataactgtcaggaagatactctttcatgttaatgttcctgttttagattttaaaagttatgattaaaacagccagtaaagcccagaaaactcaggttcaaggaagaatctggttttgagagcacagaaggtatctttactatcattagtaaatctttggcatagcatccttcctaagtacctgctctgtgaattcttaaaccaccctcgctcttttctgcctatccccctggattcaaattatctttcagagatgtaacctgtcacaaagttattatccaggaagccatttctgtcaacagcttttcgtatgtgccacgtaattatcttgtcttcctggataaaagagtttgtcatttaggaaagcaggagaccttgaattcattcttgatttttaaaagaaaagcagaccagtgactccctggtcatgacttaactcattcatcttttgcaaggaggataactgcctccataacacgtggacatacagaatgtccccacgtgtagcatgctctaaattctgatttgtgacagccgttagagcatgcatatgtacaaaataggctgttgctttgcagtaagtttggttcctaatataagatgtattgtttttaatcttttaaaataaattactagtggaaaattcaggtcaaattatttgctatcaagcattttctttagactggcacgtatttacagggtaccaaatcttctcatctgctaatttttccttattaaaaatacttccaaaatttaccaatatgactccactgctttctgattgcaagacagtggaaaacttcatctctcggagcctcggttttccttgctgtaaaatgatacctaacacctaccttcaccgagtcgctgtgatgagaatacatgtagaaatgcctgacacccagcaggcgcttgtggtgctgtctttgcctagaacagtacgatcattcagattattcagatcttttggtgaatactagccttgtgtttacgttttgggacaagagccactagaagccaaatgcgcctgcgactttgcccttcctgcagtcttcagctgcaggaccagtttttactaaagacggccagaggctgtatttggaatccagtggaaaataatgagacttggctcttcctgcagtcctcagcagcactggaaagcagcaccagaggatgttggagttgtatcacccgcgggccacttcacctcgctaaaaccctcccactcccacactacacaacagtgtgtgtccggtcaaatggtgagagacatagatagttgtctgtgttttgctgtgtccagagaaatccacagcacttcttgggtccactgttagttagcgtttgtggtgctgcttactctatcctgtggacacatgttgcaggggcggtgagcttgtctcttgggatgccgtgttttcccttcacggatgaaaagacgatccctgggaatttgtgtgccttttaggtgataatttaagttacctggggcttttaatttgcactgtagatgtcctggcccatcattcttctgattacatttctgtattaataaaataccttggaggttttcaatatgcagactttgttgtcttttaaaccaagcaaatataatgaaagtatttaggcctcaaatgctcattttccttctttttcctatctgttctaagttcccaaaatcccttattttccattgaattctaagtacagcccctggtcatctttagtgagaaacagccctgcagccaaggattgcaggaagagcaaagtctcatgcacctttgccttctagtggctctttttgtctgcttgagtcctaccaagttctcaagaaaaagaggacaccagttaggcccccaccctggcctggccttaccttattccttttaatccccatggcagggatgacccacacaccacagatcagaaaacggctctagcatgagatgcctcgggaacaggatagtaggagttggacaggagaagcccagtctctcagactctcaaatgctccctgactctgatatcctccccactttagtccagtgtctcagtttcccctcgtgtgaggaactgtggcttaggtactggttgttttaacaatcccagctctgctgactgacttggtggacaagttactgcacccctctgtgcctcgatttcctcgcctgtgaaatgggaaatcaggtagtatccatgtcctgccgcttttgtgaggcacagtgttaagtgccaaaaaggtagcatttctgatgagtatggttgatactagcacaaagaaatctctgttctccagttgcagaaggacccagggaaggtctcgttcccgggaaaacctggccaggggtttcagaggcacgagtgctgacacaggccccaccagccctggcaccttttgtgctgtctcatgttcttcaagcacaagattaaaagggaaataaatgatggctgtttcacgtctcagatcattcagaaatgcacttgtttctttgggacattttaaaaaatatctttacttgttggaatagacgtgggaaggctttcagaaacgtaatacttggctgttgggaggctctgtcatctttagatccacttaccaaatatgagaagtccacaattccaaaactgtagtggtgatcataggaaaacaggattcagctctttagaaatgtgcgtctgtggcactctgggttctctgtacagcttgctacaccgttagcttcattcagcatggaggccccgttgtgcccatgatagagatgcagacacaggagttccgaggtgacgctcagctgggggtaagcagggacttccaagccttcttccctggaaggaagccacctgcaggtgcggcctctgatggctagagaacctttgtaggcaagagtgcaggcagaccctccacagcagagccgttggtgctcatggctgaccatggtcacaggagtgcccactcttgtgcccagaggcacaggtggcagccataggaggggagggcctggatgagagaagccctggaaagcagtcaggaattgttccataggtgaaagctgctttttagatctgtctcgtgtgtgtgtgtgtgtgtgtacacatgcgcattcacatctgtctgttaaaaaccatgtatgtattcatgcgaatagctccaattccagcccaatgccaagagttcactcaagttttctccttcgctatatttataactcccttttctcaaatagagaaacctggctcccattatccctcaggtattggcttacttgtgtaattccattctactaatgtaaccagtctcccaacttggaggccacccctccccacatgacgccctcacatcctgctcagaccctcaccgatgagacgccttccctgctcatcttacatctctgagaaggataaggattcaccttgtttctcaagggaaacccaaagctgacttcctgggccttcttagaaggcctgagctccgttcctttcctgtcctggcatcccccagcgtctcccggggctcccctcccacctgtggacccctccgcagcagcttcctgtaacagcatcagggctctcgcatgccttcctgttggaggaacccacttacagcctcagattattaggaattaaggtgatttttagagtattttagacacgtgtttacactttgagctctttaaaactctggctactttagagccattatagttattatttcctttttctcaaaaaatgtggccaggcaaagtggttcatgcctgtaatcctggtactttgggaggccaagacgagaggattatctgagcccaggagttcgagaccagcctgggcaacattgcaaacccccatctctcctaaaaatacaacatttagctgggcatggtagcgcatgtctgtggttccagctacttggaaggctaaggtgggaggattgcttgagcccaggagttcaaggctgcagtgagctgtgatcacaccactgcactccagcctgggccacagagtgagactgtcatgcaagctggaaaacaaaacagaaaaataaaaaatatatagccttaagtagaaagaagatgagcacagaattaccaacaagtagaaatgtgtgaaaagggatagcaacttatgtttgtttggaatttaacctttaacttgtacttcgagaattatcgtaaagcattgtatcatacggaaagacatagactggaactctctgcttggtgataaaactggaagaaaaagtgaagcaggcatttgttgctgggggccgtctcctgactccaccttggcaaaaatctgaaagctctgagtcacaagacagccagcaattgcctgcagatagtccatcactaccttcaatacaagggttttgatatggggttcaaagtttaacaatctaaaacaacagcgggaaaggaattctgcatagaattcccaaaatcatctctccccatcatatttttctgtttgattcatgtaagtgatcaaaaatatcacaaattgactgtgttgctatatattatggcgcccagcctggctggtctgcttttcacttaccttctgtttctctgggatgttctcttgtgcagaacacatacaccaatgcggataaattactggaagcagcagaacagctggctcagactggggaatgtgaccccgaagagatttatcaggctgcccatcagctggaagaccggattcaagatttcgttcggcgtgttgagcagcgaaagatcctactggacatgtcagtgtcctttcacacccatgtgaaagaggtaaggtgccaggagaccaaaatatgatctgtgcttgaaagggtctttgaactcttttggaggaacctaaatttagtcataatgtgagaaagtggacaaaggtggcaagttgtaagatgtagcccattagtgctgagtgtgtctgcgtggacagggaaaagccgggcttgtgctggctttccttgttttgtgagcgcatggctgcctttgctggggctttccataaagagaggacccatgagggttgggagagacagagaacgtccatttctataagtaggggacctgcgcgttgttggtcagagctgttgggtctccttcctggctgtgaacctgtcacatggctgccaacatgattgcctctggattttacgagacttctctcagatgctagtaaacgtgagtgttacctaatattgagtttaaatgtgccagagccaacctggtacgaataatattaaagctaatgtcataggcatgcacctgttaatcagctcatctcatgacaagaaataatgttatttggtgtgtgaaaaataggtaggtactaattataccttgcatatatgttattcttggtagaaatcatataaagttacatgaaagaaactactatgtagcttctgaggaaaaaataatttaaaataaaagttcatattcagggtgactacaaattgagtagggatgtcaacttaccacaccttacttctgtgtaaaaaagaaaattccctgcgtcactgaggaccttcacagaggatcgtaacttattcagatgcagctcttgatgaactggaaatgaggggcccttctgggtaactggggactatgcacatggaagcttgtggtcataggatgggaaaaaggatctggaagagtaggactactggggaaagaggggagggcgaggcctgacttgcctcatttcaaggcatcagtgctcggagacccaccaattcctttaaaggaaaagaacggcactaccagctctgagatcttggacagttagtcctcagtcgggtcatttgttgctggaatgtttggactgcaggcttccctctgaaaccctgtgaggctgtgaaggagtggaggagagtacacagcaaaccactgggacccctggggtttgcactcagtcctgccccgggctggcagctggctctctcgatcctttctgccaaggggctggtgcttcttggtcccgagatggtcatcaggatagaaactggcacagctaacttcttttcctgctcctcagaatgccatcactgaaattgctcttgaaaattcttaacaaaagaggctatttttttgaggagacacattaaatggacattgttctgtggcagttcctagtcattgctgcacgtgcctctagactaagtttcccactcattgtgaaccgagcttgtctcttgctgccctccagcctctgctagctctttgtcccagcctccctgtggcaccgctaccagagtaatttttctgaaatagaaatttgactaggccgtacccctgcttttaaactaccagtggttcttcttgtatgtggggagcagcctgatacctccacatcctcacaacatagaccacgtttttccttgcagcctgtcttgtgctgtgtcctcctcttccaggacccctcccgctcaacacagtatcccctgatccagaactttctggcacctttgagacaaggatgggcgtggttagccgctctcccttgcaccttctagagctccctctacatgcacctgttaacggcagttgtcatgcgtgtgattgtgtgttactttacatgtttttacaccgtagctgagagagaaggagagggttaaggtgatctgtgtatgaaaacagattgtggcatagttcactaagctgtgacattgacagaacatgggccaggagcacagcagcctggacccttctgagggcagggacctgggcagggatgtccagtctgcaggttcctcattcggggcccagtgaccacagttgccctggatgctgtagatgccataagggagaggcaggaagagtgtcaggcagctgggagtggctgagaggccaaatcgagaggaaggggcagagggaagagggccttgcatctgtggcatgttccagagccaggtggttggagctggtgtttgtgtggcatgcctggccatattctatagcagcttagcagtctgaggtaagggtctagcttccttataggacagaagactcttcccaccaagcagtatttgtgatttaagtcaccttttcaactcggcagtggttttcagaaaccagacactaaaggataactggaaggaaagtgctttttcaaaagctgttacctacaaataattaaaaaaaaaattagccgggtgtggtggcacctgtagtcccatctacttgggaggctgaggcaggagggtcacttgagctcagaaggtgaaagttgcagtgagccgagatcacaccattgcactccagcctgggcaacagagcaagaccctgtctcaaacacagaaacaaagctcttgtccagaggcttcgtttgggctcattggcttttgtaacagcagtgtttttaaggaacaatcttctaataagagcatccacttataagaccatggagtctgtattgtcactaggtttggaaattatttaaaagtaaaaatacattttgttttcattgacttacacaataggaatttctagtatgtatgagtttgtagactaaggagaccttaaatcagttttaaggactaagtggttcacttttatgactgcaggatttttagtgcagtctatgaaaggccatcttagtagcagagaaactggcatgttttcctcgacctgcaccatcttacttgtgtgcacgtcacgtaacctgggaccaaggagggatcggggcccagttagggagggcatagcaggacacacgtgtgcccgtgtgattggcattcaaggacgctgcccgcaggctggaatgctgcccgtttcttcagtagatttgtctttccctgaccagcctgagaatttccctcagttctttttctgtgctgtacaaaagccctgaaactcccaggaatccttggtaggttccatgcgggaaagaatggtttcttcagtcatcgtattttgaagctggttattgaatgaaaactaagataagcttagaacaagtttaattagtttaaaatgaaaagctagatgggcctagaagaggaaatcatgctaatttgctaggtgtttgcataaagtcactaaatgtatttgcatatcagatgaacgaaaaattgctaaaagatacacattgtctgagtctgttcttcttaagcagatcatacaattaaaaattacatagaagaagatagaaaaagtagcttgtcttggctgggcgtggtgattcacgcctgtaatcccagcactttgggaggctgaggcagttggatcacgaggtcaggagatcgagaccatcctggctaacacacggtgaaaccccgtctctactaaaaatacaaaaaaattagccaggcgtggtggcgggcgcctgtagtcccagctacttgggaggctgaggcaggagaatggcatgaacctgggaggcagagcttgcagtgagccgagattgtgccactgcactccagcctgggcaacagagcaagactccgtctggaaaaaaaaaaaaaaaaagaaaaagtagcttgtctttttcatttaggcaaattcatgaagcttttttagaagttgctaaaggctctcgtgacagaagttagtcttccttgctgccaggtgttccacagtggctctcgtcctcactttatctggagtatagttgtcactgtctctttttgcaataaattcctggccctctgatgaacaagtaatacaaacatgaggtcataacaactcactttaaaaaggtgcaaagtcaaggtgatgtttactgagcattagctcaggaatctctttaagaaacccctggaagaaggtggctgccggaagtcttgttgaagaccaggctcttagactccaaaaactgagacctctgtactctggttcttttaccccagaggacagaatagacacttgttcctgagaagagagaaaaggggatgcattttacctaggggacaaatattttctacctcgaggtagaatgcagcaggtggttgatagaaatttcagcccatttgcccctcaagcccagatttggaagtattccaagatgctgttttctctaaaaagaatcctgaggttcgtagcctcctttcagaatgcctgcagcctggtgctttgttctgtttttgttttgttttttaagtatttggaaggaatgttgattggcctgacataagtttgggtttgatttgggaggatctttctcctcctacacgttgtcatccactcttagtccccctgcagtatgcattccccttcagtcctgtgtatggcatttattcacatcagttctgttgataatgctcctgctatttgtccttttttgtttgtcctcctttccttttgaatgcatttttcactgtttatttgttcattcactcttttcactcattcattccaaagggtctctcaaggcaatggtaatgtgcaaggaggtgatacctaaatgaatgaccaaaagaacatgcttctgcttttgtgtgtctcctacattttagacatttgtttgtttctcttggtagcctttaaattccttgaagcccaggaccatgtctcacttacctttgtgtttccactaactagtctacctcctggaattggcagatactcagtgaaagcctgtgaaataagtgatgtctatttctagcatattattctgagatttaatgatagatttagtgattgaatgagatttccattttcaaatacagcaaaagcataactattttcattcattcatattcattcaacttcattctcaaaattaggtcctgagttaactaataattacctttgaaatgtgtgggttatttgaggcaatcaggtggtgacattgagctctcagccagagtttgtttctggaattgattcagttccattgcattgatttttgttctcagaagccaaggtttcccaggaaaaatcattcccacttgaattgggctgtgattcttgctgcgtttaagtaaaggaagcctcttggttctagttctgcaaacttacacactgaactgggacaagtttttgtttagagtaatggctgggaaaagaggaacctttcattttattcagaagtcaaaaacaaaggcctcccagccacctggagatgttttgttgcagacaccagcctggctctgtctttatgcctaacaattgagcatccagtcttctttgtgctgggaccattgctcagctctgcaaggggaaaagagggagaaagccagagctgccaggcttcttgcactggggccgggggagggttcctgggaagcaggtgctctctggcttcttggtacgtgaggctctcggagctgcctctcctctgaccctcaggtcctcaccgagtttgctccaggagtatattgaaaacatacccagtgctctctcaagcacccactgcttagagggcccagatttcttttccttctttcccttgcagagctggagactgcatcgggcatctggtgtttaaactaaacaggaaaactgactaaaggtccacagtgctcattgtgtagactagctgccctccgatgggtgctctgattatcagtggttccagtgcagggcctgtcactaaacaggcctcacttcctccttgggggctttcccatgggaggtgtggctttttactctacatggaaatgactctctgcagccacagaacacagtcattttctgaattatcccagtctctcatgcgccctggattcctccagatgccttatatctcttgtgcaaagttgtctaaaatttggttcccagcttccaagccttgccttttggccttcctggaagtatttttgttgatgagtcgtctgtcattattctctaaaatgatttgctttttgtttctttcattcctatttccaccccacatatacacacatgcttcttaacttaggggattacatgccaataaatctattgttgaaaatgcactaatactatcgcaaagatgaaaattcacaggctgaaccgttgtaagtccatatgctcctcaacttacatgtgtgatggagttatgcccaaataagtccatcgtcaagttgaaaaatcaaaatcaagccatcttaggttgaggaccatttgtttgtacctccaaagatgtcatatctttaaacatactccctagcttttctttttactttttattttgaagtaattatagaatcacagaaagttgcaaaaaaaaaaaaaaaaagagagagaaatggacaaggaggtcccatgcatcttcaccaagcctcccacagcggtagcatcttgcataacctcagcacacaatcaaaccaggacactgactttgctgcagccctcaaggcttattcactttccgcgaggtttagatgtgtatgtgtgcccatgtgtatgtgtgtgtttagtcctgtgcaattgtatcatgtatagatttgtgtaaccaccatcactttcaagatacagaaccatacagaattttcccatcatcaaagggttccctgcactggcttccttcagtgatatctaacccctgctccatctctaacccctggcaaccacttatctgttcttctctgcttctattattttgttatttctaaaatgttacataaatggagtcatgcagcatgtaactttttgagatggcttttttttaactcagcacaattcctttgacacacccactttgtcgcatgtgtctgtagtagttccttcctctttattgctgagtggtatttcatggtctggatatatcacagtttatttaactatttgtccactggggacattcgagttattttccgtttttggctattacagggaaatacacagaaattatgaacaatcctgtctaggtttttgcgtgaacatggttttcatttctttggaacaaatgcccaggagtgcgtttgctgggtcctttggtaagcacacgtttagtttttaaaagacactgccaaactgttttccagaatgagcgtaccatggtacattaccaccagaaatgtatgtgagtgatcttcagctcttcagcatcttacaagtccaggattgctttaagcttgtcagtgagaatggttaaaatccagtatgtaatattttagagtagaaagttcagtgtatatgatcgagcctcagtaatttttgtttaatatgaattatttagctgcgctctttagtgcattaaattctctctatatgcttttacacatttgatttctttatttttctgacatgggtacaaatgagtaattaaatatgtccaccagctggtgaaagcaagaggaaactaacagcctagaactgtcgactgcatcatcagcccctgtgtgactgagcattagatttgaccttggcatcacttggcacctgctggcgtagcattatgtctttacatagactgcggtatctagcgtggcatactgattttaaaaaacaggtggtcttcccattggtgggaatatccaaaaaaaatacatctagtcaattatgtctttctataaaaatataatctttattgaaataattgagaaaatatagtataacaaacacaccccctaaatttgctgagtgatctgggataagttactgtgtagtacctcaacttccttagctacaatataggataatacaatctctaaggaaagtgagacaaattaaattacacgtggaaagcacctcagaatgcttttcttagggtagctgctggccagtgttcttttttcctgtcctgaccccgattgtaacatcgatatagataaaataatacagactttaaagtaaggggcaaagatacaaatatctaggtataatgttgtctctacctcattaatctttgaacaacagtaactgcttaatcttcctgtcctcctccgagtaataacctcactctgatcctattcttaacatcaaaaccaaaagcctttcgtgggatatacacaactctgtccatctccagctgctggccctcagagcagagtagactgctgggaagaacccttacccatagttcccttcatattggcaaaaatcattttgtacacatcactaagtacaaagtatttagatcttagatcccagctaaagtttcaacagaaataagtgatttttttttcctccaaataaacatgtataaagcatttgtactggccagtgggaagagagtgatattataatattatctgaaaggaaagtccttttatcagaataacttaaaacgctacattttttttctgtaagatgatgtaaaattgtggtttaaatttatacaatttttatttgttaacatcggatcactattttcaagtagagaaaagttttatgccaacagagagcttagaagttattgtggaagatcatgcagtgctgatatacctgacacatcatagtcaccgagtagatgattatcggatgaaggaattaacaatatattatcttcatttgtaacgcagtttttcagtagggattgattgaaaatataagactgtccactgacttcagattttatagtttcttgctgagggtcatttgtaaatggagggttgtaaatgtctgctttaattagctgtttgtcagtaggacttgattaatgtaatgtaaaaggtgaggcacttcaacacaaggtcaagagatgaagtgttaaggccttaaaatgcccaattggaaataggcgtacatgaatagccctgttttttttgagacatagtctcactctgtcacccaggctggagtgcagtggtgtgatcttggctcactgcaacctctgtctctcaggttcaagcagttctcctgcctcagcctcccaagtagctgggattacaggcgtgtgccaccattttagtagagacaggtttcaccacgttggccaggctggcctcagactcctgacctcaagtgatccacccacctcagcttcccaaagtgctgggattatagacatgagccactgtgcccagccctgtttacttgttaaatttctgttttaaagggcattttatgattctctatttcttattttgttactcagcttcataaactaaatattttattatcaaagaaccacaagtctttggtgaggaaagaggtaaacttacctgtatgtattttcgtatgtatttctgacacatttgtactgatcttcgttgttcttattgaataggtagagagattggccaacaatgtattagctagagttttgccaggacagcttaaaagctccagataagccaggcttggagagactggtaaggctttttgggttttgttatcatttgtttgttttcccttccatttgttgaggtacaaaaatcagaaccagaagatcaaggaagggttgagctttctgcttgagagctgtgatgttgatgaacgacaagcagaaagtggaccccatcatctctcactttggttcttggtctcctcgaggggagcactctccagacataggccagaagaagcaaaagccccaaatggtgaaggctttgtaaggaaagacttatttaatctaagcacgttcaagcctctgttctaggacaaattagatccctgggtaccaaaagaacttgataattatatcaccatattgagcatatcagtccaagcaactgtgggaaagtgggctgatgccagaagctgaaaacgcacttgtgctttttaaagaaggtggatttcacgcattactcagagtgaggttaatcctaggcagagttctagagacaatttttaaaccgctggtcaggaaaagtgaatgaacaagttataatgtgttaactttattttgttctctactaggtttctggcttgaggaaggacatgtggtggaattagtgggcaggcatttgaccaggcctttcaacatttaatttgtagacaagaaaggaaagtatgggctatctcttagttactagaattagactgttgaatggctataataaaagaatcaaccaagggtgctagcacgagaccaaaactctcctcatcctcccacactgatctccaggtagaagatgtcaggaggcaagcttctgatagtaagacagtcctcataccccacaggtcagtaaggaagtcacgtccagtctggagccacagttagatcagacgtgctgactgacaaaggtagtggtggatgatgctggaccagtcatctcaggtggacctgaggtcctgcagaacagagatgatgctggaccagtcatctcaggcggacctgaggtcctgcagaacagagatgatgctggaccagtcatctcaggcggacctgaggtcctgcagaacagagatgatgctggaccagtcatctcaggcggacctgaggtcctgcagaacagagatgatgctggaccagtcatctcaggcggacctgaggtcctgcagaacagagatgatgctggaccagtcatctcaggcggacctgaggtcctgcagaacagagatgatgctggaccagtcatctcaggtggacctgaggtcctgcagaacagagatgatgctggaccagtcatctcaggtggacctgaggtcctgcagaacagactagtttaatccctggtgtcaccgcctgtaggggagaagagtgcagtcttgccttttaactgactccacgtaacctattcaggacttttatgtctgtatgtgacatctggagagactgctcatcccaattcaggcatccggaaaactactttgctgtgttaagcgctatttttcttaaaaatgggcaaatttccagcgtatagcaaggacaggcttagtgccacagccgaaataattgttgctgcattaaaagctttgcaagtgagactgtcagtgcagaggttggtgagtggatgacgtcagcagtgctggagggagtttctagcgtcatgttgcaggtgtctgttctcatgcagaaagcctgtgagtggttgaattggtttggaaggtgtgtgtatcaaatctagacaagggcctgtcagatacgtcaggtgctagaattcagatcccaacagatctcagcaccaaatcaaccacagaaagtttcattaatcagttttaatatatgagtgttttgaatcagtacagagtaagaatcacataggtggcaacagcatgtgtttaatgaagaaatgagcttacatgtgttatttggttgagtccacaatgctgtcatgcccccaaataactccttccactgtggtgaccaagggaggccgtcgtcttgctttctggctgctgtttggatcacgtgggtattgtgtacagttgtccagtccctatgtcgttttgttttgcttaatgaatatcacatcaatttaatgtgtccacactgggcaaaactgacttgaggagtgtgagagtaataaaaacaggatatattccagaatgatcatctggtaagaacatgccctggaagctatagttataatatcctcgaacagattacactggttatttatacactctttagacttcttagtgctcaacaattgatgaaataccatttctggggagtcatgcttatgtttaattttcagtaaggactggccacagttctatttatttctactaaaaacatctccttggcaaggaaaatgccctttccattttcctgcttgtgtgtgcgtgtgtctgtatgtacgtgcacatgcacgtgaggatgtgtttttcctgcttgtatatgtgtgtgcacacacatcagcatgtttttcctgcgtgtatatgcatgtgcatgcacatcagcatgtgtgcttttcctgcatgtgtgtacacaaacatgcatgtgaacctgtttttcctgtgtgtatatgtgtgtgtacgcacatgagcatgtttttcctgcatgtttatgtgtgtgtacgcacatgagcatgtgtttttcctctgtgtgtgtacgcacatgagcatgtgtgtttttcctgcatgtttgtgtgtgtacgcacgtgagcatgtgtttttcctgcgtgtttatgtgtgtgtacgcacgtgagcatgtttttcctgtatatgtgtatgcacatgagcatgtgtttttcctgcatgtttgtgtgtgtacgcacgtgagcatgtgtttttcctgtatgtgtgtacacacgtgagcatgtgtgtttttcctgtgtgtatatgtgtgcgcacgcacatgagcatgtttttcttgtgtgtttatttatgtgtacgcacgtgagcatgtgtttttcctgcatgtttgtgtgtatgcacatgagcatgtgtgtttttcctgtgtgtatatgtgtgtgcatgcacatgagcatgtttttcctgcgtgtttgtgggtgtgtatgcacgtgagcatgtgtgtttttcctgtgtgtatatgtgtgcacacacatgatcatgtgtgtttttcctgtgtgtttgtgtgtgcacacacgtgagcatgtgtttttcctgtgtgtatgtgtgtacgcacgtgagcatgtgtttttcctgtgtgtatatgtgtgtgcacgcacatgagcatgtgtttttcctgcatatgtgtgcacacatgtgagcatgtgtgtgttttaccctattattccatatctctttccttgctcttttttttaagtgttaaagacttttactttcagactattttagaggagtcatttcattaaaccttttggaatcccactgaagccgcagggcccaaggttaagctgtgctcttcccttaggaattgacagtcgtggcgactgctgtctttagtacattaccaggaagtttccaagtggcagttctacaagatgagcccttgaagaagccaatcctgttttctatcttttgctttcaacatacgaggtgaacttttacctttctccatttaatataaaccaaaatccgtcttttaaaaaaatgtttatttttaacttttattttagattcaggggtacatgtgcaggcttgttatatagataaactcatgtcacagggggttggtgtacagattatttcttcaccaaggtactaagcatagtacccaataggtattttttctgatccttttcctcctcccagcctccaccttcaagtaggtcctagtgtctgttgttcctctctttgtgtccatgtattcttactgtttagctcccacttgtaagtgagaacatgggtagttggttttctgttcatgcattagtttgctaaggataacggcctccagctctgtctatgttgttgcaaaggacacgatctttcttttttatgactgcatagtatactctgaaaggggagagtgttgggaggagagtgagcttgtgtcaaaggagctccaggtcatgctctgcccgcagagttcaagaaataaaatgtcaccctaaggaaaggcaggcaggctgtgagaacatgggcacgatctgcaggtatttgaagacttgccacggcaaagaggaattacactttggccaaccgcagtgagagactgtggctgctctccaaatgacctgagggtgggggagcagcatttcccaaacttgacacccctgggtaacaacttttgttgaagagagtgtcttaccttgcggggatgttgggcaatggaaagaaaataaaaaaaaccccaaagtcaaattcttcttttagacttgatactgtttggttagtttaagtccatggtgttccgtctgtgagctttggccccaggttagtcacgtccatcttctgtcctacttgggtgtcatcgccacatcccctgtgccttatctgtactcagtctcgcacctctgcagggcatctaccctctggtgctggagtgtccacgcactgtcccatcttaacgtgcatagctgccctgaatatgcccctgtgtttcttctgctttttcctcctttcttacatgtaatacatttgcatggataattacttcatgatgctaactttggtttgccctctgttcctccccacctccaccccatacatccttcataaattttctttgatcatattaaggcggcggtccccagggaccggttttgtggaagacgatttttccacagaccagcggtgttggtgggggcagggatggttttagggtgaaactgatctgcctcagattatcaggcgttagttagattctcatcccgtaaggagtgcacaacctggattcctcgcatgcacaattcacagtagggttcacagtcctgtgagaatctaatgccgctgctgatctgacaggaggctgaactcaggtgttaatgaccacttgcctgctgctcacctcccactgtgcagcccagctcctaacaagccacagatcagtactggtccgcagcccacacattggtgacccctgtattaagggatcttttactccacctacccaagaatgaaaaggtgcttcccggactctactctttcttatcagggcagcaggcatgtggacccacagtacagttcgtcatttcagacagaggaacatgctgcacgtggatgaggcagttctgtttttatccctggtttttatacctgaaactgtgtcacattttatgtgcatagtggttgtcctctgagattccacctgcaagttgccattgaaactcctacttctgcttctgacttgcagcagctctgggaagctgtggctttcatacttcccctgctggccctatggctcgcccattcccacaagtacccagatgattgtctttgtcaaaaacaagagtagggaaacagataccaatggcaacagcttctgttcaccaagtgcttatagaagttgaatacttcacacgtggattctcactccggcttcccagttagagaagatgcatgtagtaaaatgctttcattacatacaggagaaaactgaagatagagtgctccaagaatttcccaaggccacacataggataaggaccccaggagatgtgttgggcccctccttccataccccacctccagacggacaccgattttagcctgggttcaaactgcatcagcttgtaccccactggggagcacagagaggttgcagctggaacaattcccagcttagggccctgatcctactttcgacttaactggaggcttggtcctttccgagggtccaccaccccagccaggtcctctaggcatcctctgtggcggggtctccctttccaggtagtgaggaggggccttttcatctcaaaagctagcttttcaaggggatttcttccagcagagctgtggggcccatagaggcttgtgggaggcttcccacatcttaatcactcgggttttcaccacagaactccatgtcccttcctagtcatccttctgtgtggatcctggtccatgagccgggccctgtacacacctgcagcccacttgtgggctgagttcaggtcctcttccacccagccctctggcctgcagatcccctgggcacctctcagcactagagatggccagcaatagctctgatggcctccagggggcagccttgcctaaccctgtggctgccagacctgcttctgtttctcagtagaatccagactgctgtgaacttccataggacacaactctcttgctgctgggcaaagatttatctttttattataaatttgcagcatgcccagaagtacaatttttcctcttaggagtttatggtaagaattttataggcatcctagaggttttttctcgttgctttattcagggatattttaggcatcatgtacaccattttaaaaacttaaaaacagactttccttgagtgatgtttcattatgatgtgtgcccattcatccccagttgatattagaagtgacctttatctaagacttttttctccaaattgaatgagaatatttcctgtaggaccagacagaaaaattccgaaggggcaaatattttaaatggttaaaatgtagccttgctccttctgcctcatttagtttggtccttttttaatgtcatgatcccaggatcagttccttcacggtctcctcagtacccgcgctggtttcaccagccagcgggaggatgagcacatccagtgtgcggtaaaatatccaggatgttgcggggaatacgctagtttttgggtttttttttttttaactaccaggtggaagggaaaacgtttgacccctaaagattcatggcgcttcccctagaattgagaggaagtgatttctatagactctaacagactaattctagcacgttttcctcatactgtactatttttaggagtaaaaagatttaaatgtgggatgatgttaagtttactagaccaagtgacatattttgaacaattggtaggaacccgaatgtgttttgaaaaatatctagagaaggaagattttaaaactgtgatctttcttattattagaagagtttttcttagaacaaaaacagtaacagtggctagcatttacttatttcttcactctgcattgtcttctcattgaaacttctaagcaactttttttttttttttttttttgagactgagtcgcccaggctggagtgcagtggcatgatctcagttcactgcaccctctgcctcccaattcaagcgattctcctgcctcagcctcccaagtagctgggactacatgtgtgtgccaccacgcccagctatttttttgtatttttagtagagacagggtttcactatattggccaggctggtctcaaactcctgacctcaggtgatctgcccgcctcgacctctgagtgctgggaaatacaggcgtgaaccaccacacccagccccaagcaactttttgaggcaggcattattaccatgcccattttatagatgagaaaacagagctggatccaggtaacttgtcaaagttacaccctaggaagtgttaagtcagtgcttgaacgcaagcagtctggctttgcaacctacactcttagtcattattgtctattacctcctatgagaagtgtttgatttgaatgatcgtttatggaagaagcactaatagtaactcttaggctgttgcagtggagttgcatagaagcacagctatgtatcgtgcatccggccagttctgagtcatttttcatcttctcttcaccggagtgtaaaaatgagacttggtaaaatcgttttgtatcttaagtgttatttttggtagtatttgctggagaagaggaattttgcagaggtccccacccaaatggccagcctgccccccttcctgtaccacgagttgggtccttgagtgaggcctcacagtgagtcaggggacaggctgctgatctcccagttcagggcccagacatccccgagcttcggctggcagggcttcagggagagggcccagcggtgctgggggcctgacccctactgtctgagcagggctgggagggtggttgggacacctgtatttcagggccctgttacgaggtgtgtcctgtccagggtatgtggattctcttctgctgtcttgattaattttgttctgttttgctgattttgctgtttttctagtaggctttttttaaaaaagcgtttttgttttctcaacagatttaaaagaagagatattaatttctattagtggcataagaacctagctaaaggggagtgcagctacagccagaggcctccattggctcctgccagcaggggacctggtttctcagtgcccagaagggcagcttgtcactgagtgacccggacgccctcctgctgcgctgcaggttcaatatttgggtcagagttggctcctttacctttattttcagctacatttcttccaatttgattggagtgagagaagagcaatgggctgcaggattgtagagtgtcagctgttttctgaggacctttttcagatgtacatttgcttaaatcattcacttctgctccaagtttgaacataaagtgcagaggcagcaccgttggtagcgtcttggcagtgggacagagtaataagctaactatgcagagtcccctgttgattccttaagtgttctccattttttgtccattgattagtactatagttatcacaggcaggggacccgggaatactccatttcctaggtcccattggacagtgacaagggtgagggcagcttcagtgaagcaaatgtattcaggcagaagatacagttgagatttttgagagaaaggagtgaaataaatggtttattttctttgtgagcagaatcagtgcagttgcacagcaccgctttttcatcagcgtccaactgaggagaggaagttggaaggtgggaggctgcagtggctccgtgcgactcaaagggtttgctttgggagtgagtgggcaccctctgtgtgtggccagttgctcaccccaccccaccacctgcatgtggaaggcaggttaccatcttaagtagaaatgtccatggattggataatgtcatggatgtttttgattaaatattttgactctttcatgaaacattacagccttgttctggtaaatggttagttatagctcagcgcagccaagttggcacatacttggtttgttagagcaaatcttgcctgttcagttaatttaagtccatccttataaccagggtaataattttgtccagagcgttgctgttgacgtgaagccctctgctgtgtcctctttcatctgctcctcgtagtgacgcctttaggtggcattgatattcctaggatccctgttttagcaaactgagtctctgagaaatttaagtgatcttttaggtcacacagctaatgctttgtaaagcatttcctaaatccagatcgccttactctaaatcttataatactgttactactatgccatgtgacttggcaacttggaatgtttttcatgggaaatgttagtgcaaattggaagagtccttcatgctatgatctttcctatttataaatgcaactgccatgttcatgagaatttagaggaaaacaaaagaacaagaaagcatcttattgatgataaagcctttatagatggtgcagagcatcagttcagatttgatgaattggtgcgtggcattttcatgtggaattaaatactgatgccaactgtggctcagtattctttctgataccagcttttgggcatagtacttcatcacctggggcttctcttccttaatgtataaaatgaaaattttgaactagcttatctctaaaactccattgattaaaattcttgaactgtatgaaatttgataacttagacacaaaaaataggtagataatatgagaaaagttaacaaatgttttatttactttaatattttcagtaaaattaattcttaggaccctgggtaacaggattgaaaaataacttctttgccagcacttttcttattttaaaattggcctgctatattttaaatgtgtactgacctgcaaataacaataaaagtatattttatgtatgtaaatattgctcagtgaacaaattgtagtatggaattgatactaagattttctgtgttaaaaatggaagtcagtttccctatgcatatttcagagaaacaaagtcatctggtaatagtgtgtttttgaagatatgtttgacagcaaaagaacacttaaaagcttagcttggatttgccatcattagtaattagggaattggaaattgaaaccatagtgagatataccactcatttagaatggcttaagttaaaaagactgaccacatcagttattggtgaggaagtggaggaattgaaactctcatacgctgctggtgggaaggtaaaaatgatacaccactttggaaaagcttggcagtttcttaagttaagcatacacctgccatatgatccagccattctacacctaggtatttatctaaaaggaaggaaatcataagttcatacagaggttgtgcccaaatgtttacagcagctttatttgtagtggctccaaactggaaataaccgagatgcccaccagcagatgaagggatcaattgtggtttcacacatgcagggactgctattcgacagtggaaaggaacgaacccttgatacacacagtagtatggataaatctcagggtaattatgctgaatgaaagaagctggacagaaaaaaaaagagtacatactgtcccattccagttctagaaattattttagaaaatgcaaggtaatctccagtggctgagagcaggtgagtgccagggagggagcatgacagagggcatcagccagctttgaggtgagggagaggctcacggtgaagtgggtatagacaaatgtcagaactcacattggacactttacatttgtgcagcttatagtatgtcagttagtcctcagtaaagccgttttgtaaaaagcttggcttggaaacagaagaccacatgcacacacagtttctttctgcaagtgcagttttgacttatgagtcttgaggcagcaggcgttgcacagggtatcaagcgggaggtcccgacttgccccatctcaccagctgagccggctgtccccactagacatacagaagatgcgtgagctgactcttagtccctgaggaggctgaaagcattttctctacatacaagccaccagggcccatttaatgtaattaattgtctttttcagttccgtgaatagtaccccagagatctgcaggagttaatggactttcaggaagtaggctctgctccctggctcccacctggcccaaagtcattcttgccactctcattccagggtgtctttactcatctaggtctccagcagcctgttttatggtggtggcagtggaggtgtctgcatcttttcagcatgcacactctttccgttgaaggcccgaactgttggcagcctgattgtggggcctgggctcgtgccgtcacctccctagctccacaccctggtccctggccaggctcggtggtgaattcctctcatcacattgtgcacttccttctgtgtgcttccgggggaaatcggtggtttaataatgaaaaattgaaatacaagtgtccacctgctaagtaagagcccgagacatatcagcagatgtttctgcgaactgagggtcttttcttatttccactgcagtctggattgagcctcgggagaatgggaaagagcagcttcccttccctttcctttttctcttttgtgacagtgctgcccgccgttcgcctgtttattttcctccctgcggcggtggcatgctgcttttgttgtgcatgtgttccgctggcagtgggactggatgcccctccctcccgtccttccttccttccctccgggagtggtctgtcaccagtcccctcccagggcaagtcacacaccgtctccactggggccccttggacaccgggcggcccacctggtggtgcagccaggccggccggcctcacccccctctccccttccccagctgtggacgtggctggaggagctgcagaaggagctgctggacgacgtgtatgccgagtcggtggaggccgtgcaggacctcatcaagcgctttggccagcagcagcagaccaccctgcaggtgactgtcaacgtgatcaaggaaggggaggacctcatccagcagctcaggtgggcctcacccctctcctggtccgaacagattctgaaaccctgcctgtgactccccttccccttttactcttgtgagtggtcagctctgcttctctgtccagctgagtgcagagctagtagtgtctgtgaaggcaaaggagagagaaacggctctcttctctcttttcctttcccctcccttctctccctccttacagttttaacttcataatagttttcattataacatcgactaataaaccacataatttaattttaatattttctcttaacatccaactagtaattattgacacttctttataaaccagattaatgtgagcttccaaggattgcgccctcaggctgatctagagcacagcagtattcacctcccaacgtccagattcagtcaggcctgcatggggcggacacccacccccaagtgctcttcaaagcaggatatggaggcagagccaggattggttttgtttcctctggaagcaaattttttttattgggtcagggggaccatttaaccccctactgtatcactcaggaaaatttatcaaatcgttgactgataactttacgtgacgttcactttgctgagagaggcaggcagcagttacttaataaaggcttaattgattgcattaaaggttaacctctcgtgtccaatatgactctgtcatttatactaaccaggtatcatccattttttacttaagaagaaaagtggctaaaaatacaactctaaagtaattttctataattattagccttcttaccaagtgatttcagaaaatgccagagaaattcttcaatgtatcctcagattcagcaggattgccccgaggaggaagcctaatattgttttgcaggagagcagcccgttccattttctgagacaagcagtgcagcttcctgccagctttcttcccctgaagatttgcgtggccggatctggtatctaacaatgtgtgactttctcatccaattcctgttcctctgtgtgctctcgcagggactctgccatctccagtaacaagaccccccacaacagctccatcaaccacattgagacggtgctgcagcagctggacgaggcgcagtcgcagatggaggagctcttccaggagcgcaagatcaagctggagctcttcctgcagctgcgcatcttcgagagggacgccatcgacgtgagtgtcccgcggctggcgcctgcctgcctgtgggagcccttggcttcctccacagcaccggcgccctcttgtctctgccctgctgaggtcctgtgtcctcacccacaccccaaccctctgcaccaggagggggtgtgggagggagagagggtccctggaggctggaattggatcatccctgggaggctggggtatgctcagccctggaccctaatgttggaaactatagagcaggcagctcgcgtggcaggagcagagcacagcaagcgctgagcggaacagaaggaagccagcacagctttctctcggccttggggtgttaaaacctcgattgggttgcacacagcactcccttgtcctcagcttaggcacaggcatcagcttcaggcagcaagtcttcctctcttcctccctgtcgtcttctcatccttcccactctcctcctgtcctcaccctccccttttctctctctctccaccttctctctctcctaccttttctcttccttgcttcctccctttctctttccatctttctctctcttgcccttctctcttctagagtgggaataatcctgacttgtggtcgtagcattttaggtaacaaaaaacacaatttccccccacaaagaggtgttcttagattatccatgattcttacctaaacgtggacttttgcatcttatatgtgaacaggagaaagaatttacaggtgtcttttatctttcttcaacaaaaagagagtggttctgggttctgtgcttaggaggagctctcttttttgataccatgcgagcagaagtcagtccaatcacatgagcacgaatttacctgggaacgtgacgtaaggagcctaagctcccctcagtggtgagcctgctctcctggagtctagccgcttcttacagctggtggctgtgacagcccgaaggcctcctccacatacctctgggctgccctgtgggtcctctgtgatggacacctgtagagcacaccctctcaatatttatttcttgtctctggtttagaattcatcagcagtccttggcactcaggctggggatggcagggctgtgcgtagcctgccctcagtcacctcggtacaggagggaccttctgcccatagtgggccgtgtggcttcccctgggcctgtctataggcctgccctggggagtggttttggtttgtggtgcaagggccagaccagccctgcgcaggactctcctggatgcctttgcttggccacttgtctaagtctccggcactgttttcgttaacaacagaccttcttggctctgctcattctcatcattagtgaataacaagaaaggagtcaaaccctaaacatgtggcatggtgaaacctgttcagatgctctcaaagtcttgacatttagatccacatggagccatgtggagaagaggcacctgcacgccgacctctgccccgtgagggcctgccatgtcctccccaaggtagcagcacagaataaacgggaggccagccacgcctactttcctctctgacttcaaaggactcgcttttgtaaaacttagctgcatattgaatattttcaactagaaaacacaaaccaaccagaagcattagttgcagtttttcttccaggacattttgatacttgaaaaaaaaaatcgattcgtttatcttaatactataaagagaaaaaaatttttaatatttaaaaaattgtatttatcgtaagtatatgaaagtacttccgctttcattgaaccagattaggaaacaaaaacatacatttttcccccaacaaagccacgaaattacaagtgccctagttagagccagtgtgccacagcctgggggagctcatcctgagcagaggaagctgtacctgcagcccagtctcaggccagcttcagatatggttcagaagctgttagaagatcacagcctgagaacctctgttctctttaatcctgaaaaatgaaaatctgagcagttcaggctttggccaggtttcctctgttatccaggaagatgccacatctgacggcccataggagtatggagttatgtcgatggtagaattgatctgttacccggttaatttattttaagtccctcatatctcttgtgtttcaattggagtagcgtctccatctcagatgtggatggaggtccagtgtggacagtcctcctgtggagaaggtgcataggatccacggaaaatgtcactccactgaagtgggtggtgtcgtcatctctcgcaagaagcttttcctgctttttagattttataatctttttaaagtttattatggccagacgtggtggctcacgcctataatcctagcactttgggaggccaaggtgggcagatcacctgaggtcaggagttcgagaccagcctggtcaacatggtgaaaccccatctctactaaaaatacaaaaattaggcgtggtggcgtgcacctgtactcccagctacttgggagactgagacaggagaattgcttgaaccccagaggcagaggttgccatgaggggagattgcaccattgcactccagcctgggtgacaagagtggaactccatctctgaatgaatgaatgtcttcaaagctataccgaagcacagaggacagtacagtggaactaccgtgtgcctgtcccacagattcagcatgattttgccagactggttaagcttctttggttatggctgtgctatagtattttagagaaaatcattgccagtttattctttcactcctaatggtttttctaaaagatgaggccattttcttacatcccctcaatcaactaaacatctccccaatttgacagtcatttcttattgtcatcgactcccagcgtgttcggattgatgtgggtgcctcaattaggaggcatgtgaggttggctcttgtgtttaatggtcagtttcttaatctagaattgtctctcctttgtcctcctcctcttcttttcatgccatcatttgctgaaataactagattggttgtcaaaggaaccagatcccacattcagtgtttgttcacttgtattattttagattgtgtaacttttagtttccctggcgtttcctctaaacttagaagttagatgcaaagacctgattctggttctgtttttgtgcacgagtctttgcgaggtggtgcatcgtagttccccatgcgaaggctgggcctgtctaatcccacttccctcgggaccctgaggccggttcaggcaccattatgctgagccttctgtggttaagtcccctcagcctttttctcacgacagtttactatgcgctgatgatcattgcttatgagaatgtgaaaacaattttcaattttattattctttctgcatttaatagctagattcatctataaagaggaattcttcattatgaaatgttcttttatcttttaattaagcaccaatatttaggataatgattggttttctatctactttttttttttttttttgagacagggtctcactcttgcccatgctggagtgtaatggtgccatctcagcttactgcaacctctgcctcccaggttcaagcgatcctcctacctcagcctcccaagtagctgggactacaggcacatgccaccacgcccagctaatttttgtattttttggtagagatggggttttgccatgttgaccaagctgttcttgaactcctgacctcaagtgatccgcccaccttggcctcccaaagtgctgggattataggcgtgagccaccacccccagccgatttactgtctacttctagtggagaccaaatactttttcttttctttctttttgacttttagcttctcttactatttttgaacaccattaggaatattactggatttttgtatatacggtatattttacacagttttggtaatttttctctttggatacacaaagagaaaaattatttatcttctctttcggtatctgtggccattgggaaccccttcatctggcttctgtgtccatttatttatttatgtttaatttgtttaaacagctttattgaggtgtgatttgtataccaccaaactcatgcatcttaagtgtttgacgtctctgtcctttggcagagagacatctcttccttccttacttggtacagagtgagaggtggctgcatgtatattttttttgtcttgatcttaaataccttctttcagattatctcagacctcgagtcttggaatgatgagctttctcagcaaatgaatgacttcgacacagaagatctcacgattgcagagcagcgcctccagcaccatgcagacaaagccttgaccatgaacaacttgacttttgacgtcatccaccaagggcaagatcttctgcagtatgtcaatgaggtccaggcctctggtaagagggctcactccatctgtgtccgttgtgatttcttcatgtcgtcatggcaattcggcttatttcagtgggatgactgcaaattttgttagttcctatgataaaggtattatagatacctgttctttaaaagaacgtttgcatttttatgtaatacagtcacatttaacatggttagagtactcacccatgatattctcacatactattttaagtatcatgaactttaattctacacaatgatatgttgtatctctgtaaatgaactataaatcccaggaaaacattttcacattctttatttttttagtttatgttttaccagcagatgtcactataggttcagaaatgtattagaaacttagcaacaacctgcatactgcattattcattttacacaaattaaatgcttaccaaagaggaaactgcaagtaatgaggataacaacaaaaaaaaccctgaaattcgctcatttgtaaagaatgccacactttcctagttatcagtgtgggagtagaaatggatgggatgtggatgtggattgattgcctatacatcctttgacacactttgccctccttgaacttgcccttcagcataatggcttggcccccagctgggcagatcattcacaaaagcagattttgtgccatccaccctttgagaacagaaggttgaagtgctagctgaattctagggtctccctttaatgtccacaggtgtggagctgctgtgtgatagagatgtagacatggcaactcgggtccaggacctgctggagtttcttcatgaaaaacagcaggaattggatttagccgcagagcagcatcggaaacacctggagcagtgcgtgcagctgcgccacctgcaggcagaagtgaaacaggtgagcaaacgactggatgcttggggaggctgcgctacagatgcttgatacctcatcgacttcccggaaattctgacctgtagcattgggaaggattgtgcctgctcagaacacagctttcctgatatgtaagataatgcgcacatacacacacccccgccccccgattacagccatccctaatgtgtgaaaagggagccagtggccaggacagctggctggctgttcacccagcacaggcagcacttgaaggtaacagcccttggcttctttcagtattgatagtctgtctcttgcttgaaaccctgagcatattgcttcttatatgactttttctgcccagtactgttaggatctggattgtttctcagactccagatgcctggggcatttcttttgttatcaggatactgtaataccacatcctgatggcatgacaaagtgaaaatgggacatggggaagggattgcttttggctcagtgccagtgggattctgtgcatggatatgacattttattaactggcttgatggagggagagaaaagcttatggtgccctgaaagatgcagagaaagcaaacagaaagtaagtttggttggaggggacttaagatgcctctggaccatgagcaggaggtggtgcagaagtaggtggcactcacatcagaacaggtagactcttcagtcagaactgttgaaaagagcacctttcagtctcccacatgccatctgcagtgtgggtatttttacatataaataagtgttgtgacctgctaacaaagccctccttcttgccaaaacacaaaacagtttatttaagaaataacggaataaataaatgtatcccttaggattcacctttgcctaaaacagagactaaaaaatagtggctttgaaaaggtgttttccgcatgtgacaagtcagaatgtagaagaagattgctggtctgcatttagtggtcccatgatacattaggctgagatcttggtgatggctggcctttcccttctggttgccaagtggctgttgtagctccagccatcacctccatatcccaaattatcaggaaggggaacgcataatgagaaagaggcagcccctctatcagaaaagaaatattttcacaaacttccccagagactcctgctttgctttcattggctagacttgtacattactgtagccaagctgtaataggagctgagaagtggttttattgtttaagccctcttccaaagttggggttttacttagaaaaccccagacacagagtggttttattgtttaagccctctctcaaagttggggttttacttagttggagtttttctaagtaaagccccaactttgggagagggcttagacaataaaagtacttctgtgctaagtaaacgagagggcaataggtattatataggttacttgaggtcactgccacaccttactatccagaagacctcccacaatctgtggtttccactgttagaatttacttcctctgagtgtgtgtgcagttgagaagctcatggtttgaacctgatcattgtagcacaatgttattcataccttggttattatgccattcaacactgcagttaagttggaaaaagagttcgtgaaataaattagttcccccttttcaagcatttgccaatttttcagtcctaaaaatgctggaaaggaatgaaaaatatttttcttgattatcagggaattcctggtgtcagtaggttttctaaaatatggcccataatctgttttgacttgtggactaattatcaacaatccactggaccctccaccttttcatttcccatttgctactaaaaataacagaactaattaaaaagatgcagcacttgcagtcaggtaccatggaagaacatcaggctgttgcctggattttaggatgatgaaggcatcagtgcctcgtacctgccaggagcaactggactatcttgcacgcttgtatctcacccctggtggtccacaggattctctgggaagtccactgcttggagttatcctgtgtaatgtttcaggtgctgggttggatccgcaacggagagtccatgttaaatgccggacttatcacagccagctcgttacaagaggcagagcagctccagcgagagcacgagcagttccagcatgccattgaggtaagggcgctgggcctgcctgtgtgttggctctttcattcctcaggacaaacatcctgaatcccccaacatggcactgaccatgggaaccacatggggctggcttggtaaagacgactcagaggacccaaattggcaacgcttctaagtctgcagctgattacaggaaagggaaacagtgtggtgccacggtgaggtgaggatctgcatcccagccaggcagcctcactgcaaggatcccaaaggtctcggaggccagggggttcctgttgttctcctgttgtaggagccctggcaagatgcactttctctcatctggaatggctcagaaccgaggagcccacgttgcagtctcagctgaggttttctaatcttgctggtctcttaagcacatttctgctatgttaccaacctcaaccaagcagagagctcagcaagaccaggtgtatatcatgaattcactatcagtcagtaaacgatgccgacagcaaaactcctcagattcctgcttaaaagcagccttgttcaccttgacaagggtcactgccatgccagaactgtcgcaaaatgactcaggccaattccaggcctgatccaattaactgtcagcatgtggactaattatttttattttttggtatgggtagggcacatgggtcatggttctgattggtagtggtgaggtaatgtcaaaggaaaaagaacatttgattacagaaatgttatctcctgctctgctcacatacatgttgtcagctagagaagaaagctacagaagttgccactaatttattccctggattaatttattgtcaactgtttggtgccattggacatgcattaacacctcttcctgaggtgcaaactctgggcatctgtatactgtgccaagggatttctagtaattaaattgcaggtaataaatcactgtgtctgggtaaaggattagaatatattgtatatagtgttttatgggatcatttgtacttcttcaggcgaaatgagaggttttgctattgtttaaaaaaaatctgtccttagagacctgtgctctccctgaccacaccctcccttggctctacggcctcactggagagaagcttacctctcagcccatcctggctcttctagtgaagacagctgagcaaaatcctactgcatttgccatgccatttgcatagatttatcagatggcatggacctccagagaacacagttgtttcattcttagctttttgatttttctttcctttttaaaatcaatagttcttgaaaacttttcactggagtccagagtttaagttgcaagtgaaaataaaaagcattcactctggccaccttttctctgcttgttcatttgcttccagcagctattatgagaaggatcaacaggaataataaacttggaacatttcaaccacttctttggctgttaagggtctttcctgctatttctcagactaagaaccctacaaccgagacccattctgggaggtcctgatcaatttcatccttcattagctaatttaaacatagatctagttgtttctcggcataaaaccttttttgctaaactgtctgctgtgcttttagaagcatcctagtgagtattaactgaaggtatttccacaaaatcatgaagaacagagtaactgtagccatcctggttcctttctagtcagtggggacactgacaaataagccttcccttttgttctctgtctctagaaaacacatcagagcgcgctgcaggtgcagcagaaggcagaagccatgctacaggccaaccactacgacatggacatgatccgggactgcgccgagaaggtggcgtctcactggcaacagctcatgctcaagatggaagatcgcctcaagctcgtcaacgcctctgtcgctttctacaaaacctcagagcaggtcaggggagaggttcccttccttgaactccactgatactttattttgagcttaatttattggacagctcaatcattgttaacatgttcatcgttattgaaacaatcagttgccagtcaagcagggaaaaggcattctggagttaaaattattcctgtgtaccttagatgtcaaaggtaataagctagaaagtagctgagaagacacctctcttcttgtcatttaaacataggacctgaagcacattagagagagacaggatatttgctttggttttgttctcgctctgaaaagtctgcctgcttttgaccctgtagttgttctccagccaggtggagcccatggctccttcttatggtcttgatcctcctgacagcatcttcatccccagagcccgactgaaagggctttccagggataccagtcggcagtggcagatgccaagtctgagcctcaaacttttcctgctcacaggtctgcagcgtcctcgagagcctggaacaggagtacaagagagaagaagactggtgtggcggggcggataagctgggcccaaactctgagacggaccacgtgacgcccatgatcagcaagcacctggagcagaaggaggcattcctgaaggtaggggcagcgctgcgggacagtgcacccatcagaggcttcctgcctgccaggtgcgcgtggcacagtcatcgcttcccaagggagcctgccccacacctcttgcctgctgtggaatgtaacggggcagtgtcgcatcagtgagaagtcagctgaagaaagaaaaccttaaaatccttttcatgtgcgattgccttgtctttctagttttcacagggaaatagctaaaaatctgtatgagtaaggattggttggaagtcacaataccaggtgatgctggagacagagtgattgagtgattgattaatttggtgaaaaacaatacctatagcttaaaataatcttcctttggagactcagcctcctcattcccttcatagggaatgaagattgcatctcagaagaggtgtaagcacggcatggagtagacacagtgcgagcgccacacggcttgtggtggcagttgctgatacctactcaggaaatgcttccgacaagagaaatgtgtcacatgcagaccaggctgggagttttctctctgagaagctttaatgaggaatttttcaagactgctttttcttttctttctttctttctttctttttttttttttaattcagcgaaggggtctcactctgtcacccaggctggagtgcagtagtgcagtcacaactctctgaagacttgaacttcctgggcttaagcggtcctcccgcttcagcctctctagtagctgggactacagtgctctgtcatatttttataaatgtcacatttagtcatacatagtcacagacgtgctttggaacagttaaatttttcaaagtagttgaaacatttagcaacatttggtgctgaatgttctgtgttgcattcttgggcccttacagaatttctgaggctctgcttgttatcaccacccagacccattaaaagtaggggtggtggtcacttttcctccttaccttctcattgcttcagcgttctcacctctctgaccactttcctgttacacttaacactttctgtgtttttttctgaagtccgtcatctgacagagttattgtttagtctgggaggataaattgtaactctttggaaattatatctggtaacttactttgtgctcccaccacagtgattttctttttaagcaagctcccggggtgaaaaaaccatcacagtttccacggtcattagttataactacgtcaacagctttttaaagcccctgcccccaacatgtccctactgcttaagtttaccaaatgctgaccgctgttaggatttcgaggtggaatcattagaattttcccctttgtccaggatctgtttagtatgaaagaaaaatgaatgccacttagttcatataattaagatagctatttaggtaaaattacaaaacaaaaatacaggcggtcctcaagttacgatggtttgacttgtgatttttggacttgttggtgtcagtgcgctgtgcattgagtagaacctgtacatcaaatgctatacaaccattgattttcactttcagtgcagcattcaatgaattacatgggattataaaataggttttgttttagatgattttgcccaactgcaggccagggtaactgtaggcttaaattgagcacttttaaggtaactaggctaagttaaactgtgatgttgagtagattaggtgcaataaactcatttttgacttacgatttttttgacttacaatgggtttatcaggataagtcaaggagcatctgtaatcacaagcctttttggatccctttgttcaactagaattttgtggtgtttgtgtataggatatttaagtacctttttattatgggaatttgaagatatgtacaaaaggagagagaatggattctcctcctattttactccttacccaacttttctgattatcaatgtatgggcatatatctaccttcagtggattatttaaaattctagatatatcattttatttgtgaatttaaacattaaattctccctttcagaaatacaaataaaataccattatcatatctttaaaattatagtaattctttaatattatctgaaatccagcattgttaaaatttttttgattgttctgtaaatgttttttttttttttttgagacagggtcttgccttgtcaaccaagctggagtgcactggtgtgatcatagttcactgcagctttagactcctgggcttaagtgatcatcccacctccgcccccctaggagctaggactacaggcacttgccaccacacctggctaatttttgtatttttttgtagtaatggagtctccttatgttgcccagcctggtctcaaactcctgggctcaagtgatcctcccaccttggcctcccaaaatattgggattacaggtgtgagcctccacacctggcctataaatgtctttttatacatggttttaattaaaattcaaacagggtccacatattgatttggttgggtatgtcttttgaatcacttttaatctaaacaatactccctcctttcattactatttattaattgaagaaatacgttcctcggattgaggcatttcccccattccagattggtaattacatcctgtggggtcatttagcaccatccacaatttgtagatttttgttaggttgtgagccttgatcagagctggtttgaaaggcggagggggggcgatggtgggggaagaaagagaggcgggggtgtgagagagagagagagagagagagtgcaggcgagcttggaaaaccttgccagtggtgcttgtacttcctatgggattactcaggagacacataatgtctagttctctcttttgtctctgtgattggtaagaagattgatcagtggttcaagtacggtcagtgcagttcatccctctgtacttcccatcagcctttcagctaatggtgttagtacccagtggtaataactgttttttaggaattgcaaaatggtaatactctaattctatcatttcctttggcctcgattagctagaattattccctctcagctatttggttattctaaagtagagtttgtccagaaaaggcagagtaaatgcttgcttgatcctttttatttgccattttcaggataatgaattgttgctatagcaacttctacatatgacttttttttagtatcatcatggatttaaatatatttggtgtgtttcaaagcagtcactgtcatttatcttttaacacgcagctcatcctatccataggagccctttcaaggcaggttgcttagctgtccttagccatcaccctcgtagtcttcagcgtcttccttgttgtttggtttgacagcgtattagtccattctcatgcgctgtgaagaaatacctgagaatgggtaatttataaaagaaagaggtttagttgactcacagttccataggacaggggaggcctcagaaaacttacagtcactgcagaaggggaagcaaacacgtccttcttcacatggcgcgggaagtagaagaatgagagaagtacagggtgaggcagggaaaagcccctcacaaaaccatcacatcttgtgagagctcagttgctgcacgagaacagcatgggggaccacccccatgattcagtcacctcccacgaggtttctaccgctgacatgtggagattacaattcggattacaattcaagatgacatttgggtgggaacacagagccaggccatatcagacaactcgaaatttcacacgaatcagtagagactcatgatgtgtttttctcttaattgaaaaaaaggtagcctcgctccatctactgaaaaagtctggaaacagtgaccaaccccaaagccctgaccatcccgaatgactagactgtgggctctaaataccatttaacactagaaggagatagagctccttgaagaaaagattaattccagacccaagacaggaaatgcacaagatgtttccaattcacatataattaaagggttttttccttaccttctttgattttatatttgtattcttttatctaaaacccttattttaaaatatgtgaatgaaactggtttggtttatcctgctgcataaacataaacacatattgtcagttaccataataacatcacataacaaagtttcaaccagggttggcaagttctgaactgagggctaagttgggccacattgatacagtttacctgtcacctgtggctgctttcatctgttgtttgtttgagtagttgtgacggagaaacagactgtatgaccccccaaaactgaaagtgtttactgtctaccctacgtagaaatccaggcacagcccagctgagttctgcagctcaaggtcactccttaggctgtgatccagggtcaggccaggtgtgcaaacctctctagactggacggagacagggcttcccttcctccgtgaccgtaagccaggggctgccctctgtttcctgccccatgggcctctctatagggcagaatgtagcagcaggtgtcatcagagcgagggcttcaggagagagagatttttttttaattgaattagattttatcctatgcattttctaaaccagcaggtggccagataaatattttaggtaaagacatacgttagagtgcagtgatgtgtactccaaatacacgtttgtagaagtcaaattagcaacacattgctctccattgttttttaggcttgcacccttgctcggaggaatgcagacgtcttcctgaaatacctgcacaggaacagcgtgaacatgccaggaatggtgacgcacatcaaagctcctgaacagcaagtgaaaagtgagtagagctgggagtctccaggggtggcccagtgcatgcctggcaagagacaaaaggagcctgcacgttgtgttctgaactctcaacttcagtttcattttaaatgtccgtttcatgttaatgaagtccttactaatgatcttagtttaataataaaaagattaaacaaatttataggttgatattatattgaataggttgataatttattgaataagttgaagaatataaacagggagaaaatgcaaattcaggatgatatttactgacattggctattttgttaaagtaagtaaaaaataaatagggggaaagggaaaaccagagttatctataggcaaaggatttttaaaagctcaaatagagaaaatacatcccaattttatcactataaagtattattaattttgtatacctaaggcatagttaataaaaacaaattgaaaaataataatatataggttatatcatttgagtgtaaaaacctgtaaaaccgtgtttgtgtgtgtgtgtgtaagtgtttagaaaaaggtctgggaaaacgtatactaaattgtaataggattgatgtggaaggaaaatggataaagaaactaaggcacaaagcaagtaactttgaccagggatacacagcctaagtttagttttataggaaaaaaaattgtgataatcagttagcaaatgattcatctcacacttttcaaaacaatatgattggcaaaaactttgtacattacattctactgtctgctcatctgattcatctgttagttgtcacaaaataattttgttacaccactataattctctaagttctttcagtaaaacatatttattgatgggctttttcttctggaaaaatgtgcaactcacaaaagcaaccgtttttctgcatgaataagtcttctgggccagcaagttatttgcattgataattggtttatttggctcatttcctgtagaaataagttcacccatctctcaatattgctttcatttgttggttgtgtcctgtcttttctgattgaagatattgtggtcctttttaggttgcgctagtttgacacacgtttttgtgtgagagggagactgtgtttcgtttattccctcgttagatcttcattatgcctttgctgttgtatatcctaatgttggatgctgtgaagaattaaaatagaagtgttctgtttccctcagagcctacttgggggtgaaaggtttatttatgctcgagtcagtgcactaagttcctgtaagagtaatggtggcagaaaagacagtctaaccccaaggcacaggcaaggaggagtctcagaccacgtggtcagaggacccccaggagcttgaggaagccccgtatccaagagggcgcttagcactgtttgctgctcacttgcccgaaattagtactggctcaggcagagactgtggaaataggagactagaaaaaatgcgttatctcatattcattttcatgtgcaatattttcatgtaagtgatagcttaattttttagcagacttcagatttcaaagttttaatttatctcactgtgctagtttacctcttcagtggagtaaaaataacagcatgaccactggtccctgggggatagttggcagtgtctaaaggcattttttattgtcatcaaaaatgatgacaccatattgtcaccataagaatatggtggtatttagggtgataatggtagagatggagaaaagtcaataaatttggggttcattttggaggtagtattgagagagtctgttgttaggctggatgtaaatgctgctcttctgttcttacttatcacaaagtacagactgctaggaactcagtaagtatttgtggaaaacttcctatattaatggttttccagtgtaataaagttaccgggaaccctttatttgatttgcagtttcagtcttgggaatttttttcttaagttttttgtttgtttcataaacttctagagcaaaacagacttagtgtcaaaaactcaaaaagtgtacaaatacatatgttagctaattccttagctactggtaaccactgtcaaggcttttgtgcaacctgtctgtgcatgtaaatgtaaatatgtagagaaatacaaacatatatttcactcacccatcccactttttaatttgttacaaaaatgggactatattaccttgcaacttgcatctttcacttaataatatatcttagtcatctttctgtgtcagaatttaaagatctgctgttctttttaatacccagtatagcatttttgaagttaatttgacctgtctctcaattgatgggtcatacattgctgcctattttccactgttctaaccagcgcttcagtgttccaacatctttgtacaaacagttttgaatagttgtgtaagcactgttcatctgaaagttaaattcccagttcaaaggaatgcatgcaccttttcagtgtcattccctggggtcatcatactcagtttttctccctccataatagaggatcatgattacctgttcccttactctttccaacactggatcttacccgtctagcaggaaagcagtgaaagatggtctcattgtttgaggttaaatgtgttcctgtatatttagtgactgtattttttaaattgtgaacttcgtatttataggctttactcattcttctaaagaattgttcatcgtttttctgttgactattctatgtcatatgttcccaatgcttaaaaattttttgtctgtgcaccagtttttggtggttcttgtttggttatgacattttaaatgtttgtgtcatgaggtttgtttttttttttcttgcctttatagcttcatgcttctctgcttccccacttcatgtcctttcctctcctaaggggttatggttttgtatttttttttgtttttttttttagacggagtcttgccctgtcgcctaggctggagtgcaatgacatgatcttggctcactgcagcctctgcctcccaggttcaaggaagtctcctgcctcagcctcccaagtagctgggactacaggcacctgccaccatgccctgctaatttttgtatttttagtagagacagagtttcgctatgttggccaggctggtctcagactcctgacctcaggtgatccacccatccgcctcagcctcccaaagtactgggattacaggcgtgagccaccgcgcccagcttggtttttctttttttttaatccacccttgttgattattactccactattttgacacaacctttaatctgtataaaagtccatctacacaaggttttaatagtcttgaaaaaaatgctgattttttttcagccattgtcgaattgcatattataaaattgtgcattatgtcgaattcatattacaaaatacacatatcccacgaatccatccagccggaggtattacagactgacgttaaatttccagtggtgtctttatcgtaagatggtcaaatggaggtgagagtgagaagaggtctggtagacatgctcactgagacaggaaagcagtgtgattctttatttatcgtgctgtcttgcaatggcatttgcataaaagtctaaataaaaatgaatggaatttcgcggttgttttaattgattgcaagcaccaacatacatcattttcttttttctctcagatatcttgaatgaactcttccaacgggagaacagggtattgcattactggaccatgaggaagagacggctggaccagtgtcagcagtacgtggtctttgagaggagtgccaagcaggtcagtgcacacctggtgcccagcctccccctaaactcccgtgctcacacctgtctccacagagaggctgagcttgacatttccgccatcttgaaaaccactttctaatgacaaacagtatagccttctagttaagtttgttataaaaagaaaaccccacagcctggtaaaagcatgtcactcagtgattttgaccctcagcaagtgtgccttcccctactgtctttacctcatctctaagacagcaaagtacaagtaataatgacaaggattatttaaaaattattggggaatcttggttctgtacttaggtaaatatgatggatttttttttatattgatgtatttatattttcaagacaaagtttttatttttccgattaatcaagttaaaattaagtaggaaatgtgacagaatatctttctttttctgtttcttttttttttttgagacagagttttgctcttgttgtccaggctggagtgcaatggcacggtctcagcttactgcaacctctgtctcccaggttcaagtgattctcctgcctcagcctcccaagtagctgtgattacaggcgtccaccaccacgcctgggtaatttttatattttcagtggagatgaggtttcaccatgttggccagcctggtctcgaactcctgacctcaggtgatctgcctaccttgacctcccaaagtgctgggattacaggcatgagccaccgcacctggcccagaatttctaataatttagtatagtcaaaaagtgttgatgtatcaagggggtacatttggagtatccccttcttaagtcattttgggatgaagtgcttctgcctgtatcatcagtcatggacgaagatcattttattgtaaaaatctgaccccgtcttaaatattaagattcctgtcacttctgttttgccttaatggttgcttaagaatccgtaaactttcatccagaatttggggggtctggagggaagcacaggggagaaggtgattcccccagcgtctgtgtgtggcccagccctggtctgggtgccttaaagtcccccagggcaattctgtgatgacagttggtgttgacccacattctgaccacgacacggacccattttctgaatccagcttgcaacctcatatgcagctgatccagagcaggcattggatacatgctttttagctgaagaaaaattaactttcttagcagaggtttcccacttaaggaacagctcttgttccaatctgaaaaatgtaagtctagaaggacgcagcccatgctcagaactgctcagttcccagagttagatgaactgggttcctaggccagggatctggcgccccaccttggtccttctctcctcctggtgacgttccaggtgtagccagcatgttcccaacagccaggtggcatgcagtcacgtttagtaaattatactctcttaacatttattagacagtttaaccatattcaagatcatcggaggcctggttagatttctaattagagatggtttcaggttcttttctcacataactttattatctctcttgaaagacaatccctcagctatagaaaagcaaaattgtacataattttgttggcagagaaagataatggaatgtattgttgcattttcctaaagtccgcttattcaccgaaaataaaatcctgaagtgcgtgctgttgcaggtggtgccccatctgccttccagccgttctgcttctgttcactgtcacaatatgcagcacatacccagtgctttcgcagaccggcctccagggctcttgctgatcttgccttggcgcaggcccctcccgcctgctggccacccaccccaggcctcactgctctccttcctatctcccactctagtcattgcctttcttggcgctcatttttggcttgttcttatctctctttcctcttctgtcttttctgtgcgctgtctcccagcccaggcctccatttctggtctccggattcacaaatcccagttacatccttgacatcactccacagtgactttatgagaagcagaactgcactctcggttccctgtctccgtgtccctcttgtcttacgtgttgttagaaacaactaggtgtggtgttctcagttccctcttcccggcgccccgcctcctccttcgcgccccgcctcctccttcgcgccccgcctcctccttcgcgccccgcctcctccttcgctcctcgctcctcgctcctccctcgctcctgcaccaggtccaggaggcgcagacctctgggtttctcagccccatcctgtcgtatcccatcccgcttcccactgctgccctggccatgtccccttgcccctctgctccagggcgctccccagggcggctgactcccctctctctgcactctagtcccttcctgaaaaggctcatagtagtggtttctttcattgtacttttattatgcctttaggttcatggttacaagaaactcaaactattttttgttttttttgtgggagtgtaaattagttcattacgacagtatggcagttcctcaaagatctagaaccagaaataccatttgacctagcaatcccattattgggtatatacccaaagaattataaatcattctactataaactcatgcacacgtatgtttattgaaacactattcacaatagcaaagacttggaaccaacccaaatgcccatcagcaatagactggataaagaaaatgtggcacatatacaccatggaatactaagaaactcaaactttttattgttgcgacataagtgatactgttataaccatctagaatatcctttttaaaaattttgtaattgtggtcacacttcagttttatttaagaaacttgcctctctgggagggaatgcttctcgatgctgccagccttggtttgtgatttgacctttaaatgaggtgctcggggctttgggctcctctcaggaatgtgtagccctctgactccattcattccttccccttccaggctttggaatggatccatgacaatggcgagttctacctttccacacacacctccacgggctccagtatacagcacacccaggagctcctgaaagagcacgaggagttccagataactgcaaaggtgggttcagagtgtactttgtatagtggcctctaagtcgaaagcgagtcttcaaaaatatcataaagaaatacctcatgagattggagaaaaggatgacccagtgggctgttccacattaactggaggatgcttcctccttccgttcacgtgtgtccctccgtgtcctccacctcctcccttcatctgtgtcctttgtccctctgatgtctgtgaatacggccatctctctccttttcttccttgtccttcccattattcccttctacactttccccttcctgtttacttctctaagatgttttctgaggacttgctatttttatgaaacactatttggtgtccccaagttgacctttatgtattcttggggtgttttctttcctacacctgggggtgtttcaccgtctttagatggtgaaaactgttacagtcgtgttgctcacgctcagtttagtctgcagttgtctgtgttttatggttggcagagtctgtgtcatcgcctctgttagtgcttgttcagaggtgtctaaaacttgaggcattttcatttttctcctgaaaataaaaataaaattatgaaatcgaattatctttatggcatatgccatatgtgtgagtaaatatggctttttgaggaaaaatataagaatctgcatattgacctgaatgttgtcccaattaaggcttatacctgcagaggctgagtccttccaagaactcacaacagttttgaggctcttttcaagtcaccattacaacctgtggggttgttgtttttcagagtctgagtatacgtcctttgtagtattttctgaagtgcctctattgttgatgacagatttcgagtttttggaaaaatctgacaattatttcaaatgtataagagtgggaaataaatgataagtgggataatatttttggttaaaaagaagtgtttctataaagtagcaagattggttatctcctgtggcccctaccctggctttgaaaacataacaggaatttttcaatcatgtagagagaggacagctactttgtattatatttatttgtccatgtttatgttttctgttactgttactgactcctcctgctcttctttgccactctctgctcctggtccccaaagctctcctttccctcggccctgaggtgctgggctctctccttttccacggctcctatcctggaggctcacacaggcaagcagggctgcagagagaccaggcatggggggcgcagcaagaagacccggcccagggtgggggtgtggtgagcactgggggagggcagggcgcaggaccaggggacagtagctgcccccagaggcacaatgagctctaaggagggccgccccaccctcccctgcagggagggatcatggcttttcctcctccacatacacacctggctggacagttttcactttttgttaatatttagatattacataatagttatgcacattatatgatccgtatttaggggcgtgtgtgtgtctgtgtgtgtgttagacatgggatcttgctctgttacccaggctggaatacataatagttatgcacattatatgatctgtatttaggggcgtgtgtgtgtctgtgtgtgtgtgagacatgggatcttgctctgttacccaggctggaatacataatagttatgcacattatatgatccgtatttaggggtgtgtgtgtgtctgtgtgtgtgttagacatgggaacttgctctgttacccaggctggaatgcagtggcaccataatggctcagtgcatcctcaaacttctgagctcaagggatcgtcttcaaactcctgagctcaagggaggctgaggtgggaggatcgcttgaggccaggagtttgagaccagcttgggcaagatgacaagatcctgtctctacaaaaagaattttttttaattagttgggcatggtggtgtgtgcgcctaaagtcccaagctatgtctgcttatttgaatattgtttgattataaaggtattaagaaaatgcctaacatcacataccacactcaaagctagatttaagatttgccatctttcacctctgctccactctgcaggccattgtgtatggccagacagcctgctcactgcccagctccaggggccatgcatgggggatgtgatgtacacatgactatttggaattgagtaacatggtggcctgctccactaataaagtgtatatgaaagaatttttccattcctgaatactccttttcctcaagtttgatgtgtggttattgaaagattgggcaatgacaggcttatttttattcttgtattttataagaaatgtctaaaattgtgagtgatatatgacctttctgatcctcagatatgtagaactgtttcttttgttgggtttattgaattggttataccaggaggaactggtagattttgaaaagaacacccctcacctttccttttcttagcaatctttttctttggtttctgactgcctttcccttaatcagaaaacacctgctttggtgtttggagatgtcctttgatttttcatcatgagctgaggctccctcacttgccttctgtcacccgatcttagaatcttctaagaaaccattttgcttttactgtatagagaattcttagctctgaaaggaaagtctttcagtgcacttgttacaatgttataacatttttagtgttgatggaaatgaagctggaaggctaaacaagagtctcccatccccggctcgctgagactcggctcggtccctttgcagctctcagtgcagtcatttctccacgggtcttgcaggcaccacctgcatccaggttgtgggtgtttatttaagagagatttctgtcctcactccaaacctagtgacgtaggctctcttggagtgaggcctgcggatgagcatttgaacagctcaccacttgatttttgcacacactgaggtccggaagccattgccttactgacgccacagccttcttcccatagggcttcctgtggtcctgatcaccagcgtccgcaatgccaaatgccttactttgttagaaagtgtctaacaccattgaatttctgtctaagaaaatgatgagcaaagctctcttgagcttgtggacttaagacttcaatttgcttttatttttctccagttcctcgattatgcctacagatgaagttgttcagttaaaatgtttatgtgctttttaagcactgtaacgatctctagagataacaaatagaataagaatgaaaatccttataatatctcactttaaaagatgtaagaattttttttaatgatgttttccaaggtaaatggctttggaaaaaaaattaagttggatttatatctcaccttgataccgagataaataccagaagaagatttaaatatcagcagtggtacctaatagtaccagaagaaataacaggatattttttatatcctcgtatggagaaatttgtctaaatgacacaaaatccaaaccatgaaagaaaaggttaataaattcacctacacaaaaaaatgtaaaactttacacaagacagtccaccataaggaacatctaaagttaaaaatgaaatagagaagatatataggcagctcatatcacaaaggactgatttgccagtaagaaagaacttttacaaatcaataaggaaaaaaaagaccaagaaaatggacaaaagatattaaacatgtgtcatagcaagggaataaatggccttcaccatgagatcatcaactttacttaatataagaaaagcgtacatcaaaaccacactgagttcatttcacccagtggattagccgagatcaaaaaggtggaccccatgctgcgtggacgaggctccgttgctgggggagtggagcagggcagcccctcagaggcctccggtggcatcttcctgccccctcgcactcctgcctgctcacactgcacttcctgtctgccccagcagttccaggtctcacaatgtgtgttacggcagcagcactcaggcacgtgtctaaccaccgttcatgcaactgatggatttcttgcattgttgccgtggtagacggaatttggaaacaacacggagacctattggtggagagacgttaacttacgtgcatccacacagttcacatccatatagtgaaatattacccagctctacctaaacacaggcgaggactttagttctgatcaggaaggacaactaggatgtgttcagtagaaaatgctaatacagagcagtgtgtgttgtatgcaagtacacgtgtaagaaatatgagagagaaaaatacttatatacatttgcgcacttgcttgtacatgcacataaaatgtctctgaagtgatagcaagaagctggtgattggaactggtgacagtggaaggtggggtgagaagagtttttactttgtatcttttttatctttggaattttgaatcctgtaaatgtattttaaaaataccaatgcaagtaaaaatatactgagatatttttaaagttcataggttagcagatttatggtacttagtttttatcacaccattcagttgctcaataattcttgtttaattttggcaagctgcattatctttttatcttcacttctgtgtccccatcacttaaaacactcaatagctttcttaaccccttaaagatagacatacaggtagtttacagtgccctccacagatggcccttgtggcaatgtaagagatgttagtgaaacaagcaaagatttctgggctgtgaaggtgacgttctcacaggagaaggacagacgacgattgtaaaaaatcacttgcaccctctgtcagaaggccatacatgctatgggaagcagcagagcagaagaataggcagggaggcaagctgcagtttaagggggtccagggagggcccgctaagagagtggcgtttatttgagtagagacatgaaggagccatagggatatctgggggagtggctttccaggcaggagcaccagtgcagaggccccaaggagggtgctggcctggaggggtgagttggtgagccacagctgggggacgggggtgctgttgggtggctaggggctggctggagtgttggggttatttgtgtagagtctggaggatcttgacagctgacttcacaggttacccagtgaattatggcttagaactttgattttacaagctaagatcatttatctgggttttgaactccgaccttctttcttttggggatttttaaagtcagtttcctgaatatgtgttaaaaagattttctagttaaagcttaatggagaatagcaggttccatagaagaggagtaactcacttatttgaaaacactataacaaaggaagcctaatagtaataaccatcgaaatggatgtgaagagagagagctgttgagaagtcagagttgagtgaggttgccaaatggtatatataacttgttgtatggttgtctgtgtatctctgtgaaaaataataaactatgcttaacttaatgaaagatcttttctgtgtacatacaaaatagaataattttagagagagctctcaaacagggaaacaaaatttacagtacctctatatagatgatttcctgactagtgaattttccttcacattttctgagagttaaagcaatcaacacgacacagaggagcttcatgaggaattttgttgagtgcctgctgtggggacagccgtggccacacatgcttcaggaaaaccaaaaagtcagatgactgcttgccccgaaagagctgtgggtccagttgggcacaaagagtaaacatgcatagagcgaggagctgtctttgctcagcggctttgaggagagtagcagcattgtgaagaccgcgttcttcgcatacattcctccatgcatccattctacacatttttactaagcacctcctagatgaagacgttgctgaaaaatagtctaagtttattctttgaggtcataaaaatgccattcgttgtagcagagctgaggagagatagctggtcaggaatccgggagatggagtgggtggacctggggctttggtctcagtttctaccatcagccggttttcctgttcagagctcagagttggagtcaagtcgccactgtgtttgaggtttctggcagtcggattcatttgcctcacaatactttcctgttgttttttgcagcaaaccaaagagagagtgaagctattgatacagctggctgatggcttttgtgaaaaagggcatgcccatgcggcagagataaaaaaatgtgttactgctgtggataagaggtacagagatttctctctgcggatggagaagtacaggacctctttggaaaaagccctggggatttcttcagattccaacaaatcggtaaatggccttgtgcaaactgaataaattatggtcttcttcctaacgccctctctgctgatttaattaactgagttcattggctctgttattccacagagtaaaagtctccagctagatatcattccagccagtatccctggctcagaggtgaaacttcgagatgctgctcatgaacttaatgaagagaagcggaaatctgcccgcaggaaagagtaagccagtctttcagaatctaccaggattcactggaaaagtgaagagaatgtcatttggacagacatgcttctgtgtgtgctttgaagtcacatggcacccaggctttttgttgctctgggtggacttagttgtgtcagcacagacttcgctgcgttcactgtcctcttatcacctggttcagaaacagcatctagtttttatccctgtgcctgtgtttcatttggagttgatgaattgtcattaatagatagtgacactaaggagaggaaattaatagtttttatcacgcctaaaacaaatttagttgtgtaaaagttgccagttagtaaactctatataaataaaaaagagtgctctaatccagtggttcttaattggcagttttgcccccaatgtgaggggacactttggttgtcacagtggggagggggagggagtgctgttggcctctagtgggaagctgctgagcactctccagtgcagagggcagccccacagcagagttacctggccccagatgtccacagtgccaggttgagaaaccctgatctgtcggtacctcagtaaagtgtgtgcagaaatctttttttcccctttgaattagcgggtggatactgttctatttgtgattcacctctccaaaatgatcaatctaagactaatacttttagacccactctgttatttcataaatccataaaagtagatagtgaagtaagctgcaccctgactgtactcctcactgtcttcctctctttaaggttcataatggctgagctcattcaaactgaaaaggcttatgtaagagacctccgggaatgtatggatgtaagtaagttttttttttttttttttgcttgtttatttagattgagcataagcttgctattttattcttacctgttggtagtccttagaataatcacaatttttttctgtcatttttttaaatgtaaagtatgcttcagcagccggtttcatgtttctgcacttctgtagagttctaggtttgtttttcactcattacagagatgatacagcattaatcctctcattctgtttatcacatgatggcctggctaacactctctttgtatagaattgtacagcagcttcagagaaatgtgcctactaattatgactggcaactaatactcagtggtatcaggaatattggttatacttgtggagtaggttaattccaaaatttgaagctgggaataattttagagttgaaaagtataggaactcctctcaagtattaacagcaactgagggccttttttagaagggttttttatgttttgtaaaagggtccagtccttagttatactttcacttatacattaactctgtgtgtttacagatgtcagaaacagctgtttcttgaaaatatggtgattatttttgtctaatccctgtttccctctcggctagacgtacctgtgggaaatgaccagtggcgtggaagagattccacctggcattgtaaacaaagaactcatcatcttcggaaacatgcaagaaatctacgaatttcataataagtgagtggctttttctttgggagcagttacgcttgaaatccatgtgctgaagtttcatcacaagaaatgaaccattcccattgaattaagcagatttcagtgattttgtttccatttgaatgaagcctatcagtctttctccaaaaagactgacattctagaaattcttttaatacagactcaactttatgtttgtacttatcttctacagaaataagatcaggaaaactatgaaaatatttttataggaagcttaatttctctgaagccgagccgtcaggtgccctgtgacttacttctgagggttgagagacagtggagcccccttgggactgcaggcctatgctgtttgctctcttatagtaagagaaaggaactgaagaagcaacagaagtgtattctgaccaaaataaaatgcattttcctttggccacaggaggtacatgattctcttttaatattgttaaagcagcggcagcagaagctcctttaggtggcctgtgatgagatgatgctggggtcagcaagagcgcagtcccctcacccctcagcagaaggcagaaaagaccaaatgggtcttcagccaaatatttacgtctccgaagtatatgctcagtgaacacactagcacttgcccagaaataaatttgttagaaagcatttgaaggcgaaactggctagctgtttgaaagtcacaataacttaccctagttaagagctacatgttttgttcattctttagggggcacagatttctcagtttctggcatatctcactagtaaaatgttttaaaacacctttgtaatatgataccatttttattctttgcagcatattcctaaaggagctggaaaaatatgaacagttgccagaggatgttggacattgttttgttacttgggtaatgaaacctcaaccatttgttctctcccagctattaggtgacgttgaaggaagttaggagggatggtcttcatttcctttaagtcaccatcttctgctcatatccatgcttgcggagaaatagactttacctcaaagaattgcatacttcaactaattgtttttgtggagtgagtttttttattggccctggtgatggtttgaaatagaatatttagtgtgccaggtctccgcttgaccctggggatttgctgataggtgagttcccagtccttctgggggatcgtctagtctagaggggaggcagacaggtgaacgtgcggtcatgctgtccaaagcccacagccagctctgcacgcgtgactgtggaaagagaggactggtgctcagcccgacgtgtcggggtcggggaggctgctgcagctgcatgctgtcagaacgatgtgtttcttatttcagtagctttctttttaaaatagagtctcttcaactcgaggcttaaatttccgttatccatactgcttcttttctatatgaaagtttatcatgcgttgacttgttatgatttaaatgagatctttttttttttggcttacaggcagacaagtttcagatgtatgtcacatattgcaaaaataagcctgattctactcagctgatattggaacatgcagggtcctattttgacgtaagtaatagattcctaaagagaccataattttccaagttgtgtacataaaatgcggcattactcataactttcacctaattgatagtacaatgttttcatttttgtctatcatttttgtctatcattttgtctatcatgtctattgggctattcttctattgtcttctgtttttaaaagatcctacacaaatactggaagccttatatctgtaaggaactcagattgtaatatatagatgtatgtttgtgtgtgtgtatatgttattatttatattcagtcatttataatatcattactatttatattcaatacattttttcacctgtaatactgtatacagaaggcataaactattaagcttcttttccccctcagtaaaacaaaaataaatgtgaatctttttatttttcctattttaatttcatgatgttacgaattttcaaaaacaacctaccagtaaagttttacaaatagtgccataacaactaggataattagaaggttaactaattgtgttctcattggagtaaacgtagatacaggtcatctgtgttttgaaagctgttgcagcggcttattcagcacaaaagagatggagctttagaacgtgatacacagagtgctttctgggtttccagaacttggtcaaatatgtgccaatacattttgattgaaggataaggtgctattgaatagtgtgcatagtttggtgcataaggttgtgaggatgttggacttgttttctgtctttacacttgtgcatggactggtgggatcatcagctcttatgtgaaagtctggggaagtagaataaacttttcagtttctatctttgagatgaagccctacctgtagatgaccctgttttaattgtcattctcctgaccattacattacacattacacatcactgcctttgttaataggaagccttctcccaggccaaagtggccttttcttgttaatatttcacatgattctaggtctttgccatcagacaaaattcagcacctgtatatggagttagaaatattttagtattaagtatttcacttaaacagtgagggcacatagcacatttaatgtttggaatcaaagccattttagaaacccttatgccccagcaaaataaactatcatcagagtgaacaggcaaccaacagaatgggaggaaatttttgcagtctagccatctgacaaagggctaacatccagaatctacaatgaacttaaacaaatttacaagaaaaaaaaaaaacctatcaaaaagtgggcgaaggatatgaacagacacttttcaaaagaagacatttatgcagccaacaaacatatgaaaaactcatcatcactggtcattagagaatgcagatcaaccacaatgagatactatctcacaccagttagaatggcgatcattaaaaagtcaggaaacaacagatggtggtgaggctgtggagaaataggaatgcttttacactgttggtgggagtgtaaattagttcaaccattgtggaagacagtgtggcgattcctcaaggatctagaaccagaaatgccatttaacccagcagtcccattactgggtatacacccaaaggattataaatcattctactataaagacacatgcacacacgtttattgcggcactgttcacaatagcaaagagttggaaccaacccaaatgcccatcaatgatagactggataaagaaaatgtggcacatatacaccatggaatactatgcaatcataaaaaaggatgagtttgggccgggcacagcggctcacgcctgtaatcccagcactttgggaggccaaggcaggtggatcatgaggtcaggagatcgacaccatcctggctaacatggtgaaaccccgtcactactaaaaatacaaaaaaaattagccgagcgtggtggcgggcacctgtatcccagctacttgggaggctgaggcaggagaatggcataaacctgggaggcggagcttgcagtgaactgagatcacgccactgcattccagtctgggcgacagagcgagactccatctcaaaaagaaagaaaaaaaaaaaaaaaggatgggttcatgttctttgcagggacatagatgaagctggaaaccatcattctcagcaaactaactcaagaacagaaaaccaaacaccacatgttcttactcataagtgggagttgaataatgagaacacattacacagggaggggaacatcacacactggggcctgtcggggggtgggggtctaggagagggatagcattagaagaaatacctaatgtacacaacgggttgatgggtgcagcaaaccaccatggcacatgtacacctgtgtaagaaacctgcacattctgcacatgtatcccagaacttaaaaagaaacccttatgccctaaaacatgtcttcaagaataagagaaatcatgcctgagagatttcacaatttatatgctttcagtattccttgtacagttggtttatttttttagaggctttcttctacagcttcctctcttctccaggctatctgataacctttgattatgcttcttaccagtaacaagcattattgaacatctgtatggtgctcatttaactctaagctctgtcttaggtgctagtgtaaagtggtgagtagcacagacagggcctgtcttcacagcaaggaatacagcaaggaatacaaccagttgtaaaggaatacaacctttacatgcaatacagatcattgcatgtaaaggacataattacaaaatgcaaagtgcaaatcatggcattaaaagtgcaattgaacagtaaggtagatcctcctgctccaaagtaccccttcctctccagaagtaacattttagaagcaaagaagtttgtgttaataatttaaaagcctcttaggaaaaggaaactttattatttcagcatgattaaacagttgtcaggtacagtatttggaaaagtaatgtgttttatggccatgatttaatagtgtagccctatgataactcttgtttcttgtttggttttaatacaggagatacagcagcgacatggattagccaattccatttcttcctaccttattaaaccagttcagcgaataacgaagtatcagctccttttaaaagtatgtataatgcgtcttcagcctgtgaaattttatgaattatgtattattttgacatttactatatatttatataattaccctgaattttttgaaacacctagtcaattaattttactttttaattcattagtatttattgacctgcctaatttctcattgcaggagttaaatgagagtgtgtgtcatgattatgcgtctgaactgcactgactgaccctaaacataaaatgagaaatcatcagttcttgatattttagtacccttagttcccagctgtggcttgctgactgcgggccaggcatggtgcactttggtacgctctgcatatgttaacctcccaacaatgctagtctgcaggcatggaaactagcctcagactgtaaggagtgtgcccagaatcaccactcaaacacgttaacaggctcagctcagaacacagatctggctgatgcccagggcttccactgaagccacggagaacccatgcccaggaggcttcctctgtcttgttgcttgtccctgatgtcacacccctcgcggcacaccttgtccatacagaccgcaagtattggagtcaggctgacctctgctttttattagttgtgagtgactatagttaaaatcacatttaagaaaacaatagtgattagtcttgacaatagaaaggtaaacaaaacttagaatttgtgctaagagttgtcacaaaatgtattttatttttatattatatatcatcaatacacattttcttgactacctaaaaattgacagattttgtctggtaatgttcagcataccattttctcagctggtgaatgttattaagcattaaaatgtagaaacatgcattcatcccagtgatggtattctatgaatcctgccatgttccagggactgccctaggctcgacaacgggaagttattatgtaatttgtctagatataaaagaaatttagaagatggagttacaaatgctggaactcttctttaccctttttgttagcaagaaaaatctacagacagtaataagtagctacatcgttttgtgaaagtgatactattatgggatttttcaattggaaaagctctcctgtacttttatatcaaaatgccgttaagtgattatgtgaccattcccgcagaaatatatagttactatgaatgcaaaataagtcaggaggctaatttgttcatattcaaatttgtcctttgctttctaattctacaaaggcagtttacctttcagtgtcctcaagatgtaaggattttgttttcagcatgtagttctgctaaactggtgcttaaatttgtaaacctcgccttactctgccagaggttcttcaggagaacagtgataagctctcttgagctccccaacaaggaaggttttctgccagttgtcagttagtaggctcagtacactgcatttgtgagcagtgtttgccatgctgcttagaatcacaggtaaacaccatctggtgatgagggaaggtgcccatcaggcagctgagttcctctcaagtaaccactgggagaccagtgctggctgcagtgtcatacctctcttttgttgactaccaagacacaaaacactgctattgctattactgactggtagtaattattaatacaccaataagaaagtatcttggctgtaatcccagcactttgggaggccgaggcaggcggatcacgacatcaggagatggagaccatcctggctaacacggtgaaaccccgtctctactaaaaattcaaaaatactagccgggcatggtggcgggcgcctgtagtcccagctgctccggaggctgaggcaggagaatggcatgaacctgggaggcagagcttgcagtgagccgagatcacgccattgcactccagcctgggcgacagagcaagactccgcctaaaaaaaaaaaaaaaaaaaaaaaggatcttggagcccaccagaaggtgaacttactgttcctgttatcattcatttaataacggatgtttctctaaatggctttgcaatgtaatcacacacatagggctccccagagagatgtaattcaaccattagagcttttctaaacatcctacgcaaaaaggaaatgcatttgactgtaagtaactcatgcggtgttactgtttctgctgcgtggattggctggtccggtttagatgggacattgcattcatagctccaaggtgcagagtcacgctgggattgtgtggtaaacgcacagttggacctgacatggcagtcagctgtaaccagtagctgatggtgtgttacataataattaaatatttctatttatcttttttttttttttttttttttttttttttttttttttttttttgagacagggtcttgctctgtcccccaggctggagtgcagtggcacaatcttggctcactgcagcctccacctcccaggttcatgtgattctcctccctcagtctcccaagtagctgggattacaggtgcatgccaccatgcccagctaattttttttttttaagtagagatggagttttaccatgttggccaggctggtctcgaactcctgacctcaagtgattcacccacctcagcctcccgaagtgctgggattacaggcatgagccaccacacccggcctctgtttatcatttttgaggcttgattgttaacaggtatactaatttcatcttaaactgtgaatacatctggcttactctgattagaacaggacaaaccctgccatccattgaataaagaggtagtagtttatttctatgagaacatatgcccagttgaccacattctgtttttatcttgaaagccatgggctttcataaactgtttctgccaaggtcttattggcagagcattctgcagtctttacctagtttctgttgtttatctttgcaggagctgctgacgtgctgtgaggaaggaaagggagagattaaagatggcctggaggtgatgctcagcgtgccgaagcgagccaatgatgccatgcacctcagcatgctggaaggtaaaggaccctccataccccagtgtgcatctatgcagtttctaatgacactgtttgtaaatggatttcctgaaccctaaaaatccccgctttatgtctctatgttagtggttaagaacatttcttaaagaatcagtgtcattgcttttcttgaggaccacataaaatgtttctatactcattgaaagccttttctggtcccttcactggaaaacagcctctccacactctggactccaatagcactttgtgtcgcttgctgcaggccacctgttctccctgttagatggatgggtaggtgggtgtatgggtggatcaaaccccaggactgtaaaatccttaaaagaatgtgttgcttccccacctctgtatccattgcatcacttgctagagcctggaacatagtaggcaccagatatttccttgtgtaacatggtaaagagaaaattagataaatatgtttcaaaattagagcaattataatttccataaatgcctctgtttaagaaagctcttcctgttgtgcaaagcttggttcttgccaggctacacagaataagttttaatcctgccccaaatgcttttgctagcctgtgtctttatgggtaacactgaacataggtgccactgtgggtaataagacccaaaactcagaggccaagcaaaacagatttttctttctctgatataaaatgctgatctggtatggccgcccttcatgatgtcatccaggacccaggctgtgttccagctagtttctctccattctagttgtttttctggctggctaggtccagggtgtttcaagaccatgccaacattccatttagcaggaagtggggaagaaagtcagggaggaaactccagatgggcagacactagcagtagtacccgctactttgctcacttgcccagagcgtaggtacctgagctgcttttaactgttcctggggctgggggatggagtgcttattttgagcagccctagtgggagcttctactatgagagtaaaaagagagtggaagtcaggaggtaatgggcagcctctgccctagggctggctttactaagccctggtggcttcataaccaggtgataaagcaggccacttccatgaagagaggagcagtagtgaagtccagagcacgaatgattcacatgcagactgtcacattcagaggagggagggtgcaccaagcatgggcagccagggacttctccaagaagcaagaccaggacaggtccttgaagaaagcctggacctgagcagagtgtctgggaaggatgctctgggctgaggaagcagagagaatcaagacggaggctgggaagtaggtgggggcttagaggagagtcggaactgtttcagaggaggagctttcggtggtgggatgctgcaggagagggctgaagagaagtagagggtggaaccagatctcaactgttgcagaggcccaccagagggatagaactcaaagaataaagccatgaggaatcgcaaaatgtttttgaacaaaggaaaatatatgtaaagtggtgtgttaggaagaattatcctctgtaggatgggtcagtggcgtcgagtcaggatcagatgggaaactcttatctagggttggccgatgggcatttttaaaattgttgaaaatactaataatgctttcttgtgcatcagtttttatttttcttttaaattgatttgcctcccttttttcatgttgtagggtttgatgaaaacattgagtctcagggagaactcatcctacaggaatccttccaagtgtgggacccaaaaaccttaattcgaaagggtcgagaacggcatctcttcctttttgaaatgtccttagtatttagtaaagaagtgaaagattccagtgggagaagcaagtacctttataaaagcaaattgtttgtaagtataggcgttcagaattgtaagtctaaaggtaacacaattgcagtctttttgtaggtagagaagaattgttcattgtcttcagtttaacctcccaatctgtcctgaaatgttcaagtctgaattgtggtagggttttcatcttcagtgaaattatttcccaccctcaagtccactagagggtgctctggagtttatagacttaggaaacttgctcttcttaaatcctgtatcatataactgcaggataagaaaacatttcataagtgaaatcatttatctccggtgtgcttaactagctttataaataaaataatcatatctatgactaagttcttattataattaatttttcaaccataaacattggagtatatggaaacagccttactgggtggctcacatttaaaaataaatgtatgaaatataagtgcatgagtaaatttatggttgtttataacagtgaaatgtcattattagagaaaatatacttaagccaaagtacagtctgaaagatccacagccccagctatgtggagacagctgcccctgagtgcttggcagatccggtgatgcattttaattcgtaacctgtcattgtacttcttggcaagagcaacatacctgctgccattttgtgaccactggctagccttaccagcctccccaagggcagcatcgtctctggatccagtgtacttccatctaacttagtgggccgtttctcagaggcttattcatgcagggtcgctgggcagggccaggcagaagggacgattgggttgcactaaggaggaatcatcatcaagaaaagaatagaaaatgccaagaaggtgggtttctttacagcagatctcttataaatactggtagatgtttgcaatttggacaacttacacatcatactttttgtgatgtccatatataatgaaattcttcaggtaataaaatgtccccgagtatggaaatcatctgagtaataatctggaattcacaggttccaaatgatggttttcataccattttgtttggcttgtgttctgtttgagatcgtcttttggatcacagcttgcctgacatcattttaggtcacattctgactggaaagaaaaaaatgcaacattgctggctagtaatttcattagctggctttaatctctctttagagaccaagctcatctgttttagcagccaatacatcttcacttaatttatcttttagaagttaagattccctcagaggctacctctggagctctggatgatgaatcacttcctttgctggggtggagaatgcatcagggggaccttgactgtgggggaggggctgaagctattgacctttctctgcatgcttccatgttctgcatatattacagagggattttgcctcttagccgttaaaattattgatgaaatactaaaagctaatgctattgataaagaaattggagaataagctgttaaaacatcatttgccctctgggaagctgtgtcattaatactgaagagaacatggtggcagcccttttgcaaccaggaaagactcattttgcagtttgttgcttgtaagattgcaaatagtcgaatcttgattgtcagatagtaggattttcacatgttggtttccttcccctgaattttttgctcgttgacctgcactggggtctccagtaagagacgctcacaggaagcgaaggatgaaaccagtcacctgtagcctaagaacacaatgtcctcattataactcacatgacagctgagatcactagtgacgttcttataacctaacatggccacaagtaaccaaaacctgtttccttggtctctgttctgcatccttctagaattttactgtcacctaattatataattgtctttttatccagacctcagagttgggtgtcacagaacatgttgaaggagacccttgcaaatttgcactgtgggtggggagaacaccaacttcagataataaaattgtccttaaggtacgttcatttgaagctgggaatgtgctgtttgaaacatttactgtggccatccatgcttgcttttccgttgttttcatattattattatttgttgttgttgtttgtgtgtgtgtgttctattcagattggtgactaccacaaaaagaatagtggaataaattcagtttggtgttctggtgatgaaacaatttgagttaaactttcacttgactcctgaaagggcaaatgaagcaaggtctttttatatttttcccattcttccagtctttgaattcattgactctataagagatgcaggaagtcagggtacaggaggaatgagatactgaccaaaaactctgattgcgcacttgacctgtttcgaaaggaaaaagtcacctggtgcgtgtttgaggacctgcgacaggaagtcgaggccaaccgtacccacagtccttacagagtcctcagctctgtggcttaatagtttggagacggagggaaagaggaatgattattagtgacagggtttgatactgttatgatttaaaattcaaaaccactagggatgctttagggtatatagtctttgggggaggaaaatatcttggaatatttgatttgaactctgttttgattatactaacctctcctgggaatggtcaagagctctaaggttgtcttatgtattttcctcctctgtgtttgagaaaatacagatggaacttttggagccatctggaaatgccatcagcggctttgggatgtttgggggacggtggagctaaggcttatcgaatattgggagatgagccagagtgtaatgggactctggtgtatgaacctgcatgtcaccccttgtgtctcttgcatgctttttcatctctttggtattttcagtgactgtgagttactcccctgtatgtcagccttctagagcctgttcttcagtggaagccattgtgttcataagatttttgttcatatgtgatagtgggttgttttgcagtgaatatgtgattatcagcccaatgtgctctggctagtactggcataaagccctatatgatatcagttgcaccgatagctaaatttaaataactgtattttcttcctaaggtctaacattttaaggtatactcaaaacctggaaacttgcaacttatataaaccgcttatccagactagctacagtagtagatgccaaaaggtgcttccaaaaaatagtgacagatactttagccagatctggactttcatttaggatgtcgtaaatgctcatggtacagttgacaaataagactcttcttatttgtcaggcttcgccaggtacaagttttctagggaattttgggtaatacctttctgacttccaaggagaaagtaaaggaaacgatgttctcattaatttcagggattgctgcatggtgttggtgtagagaggcaggcgatggtgatggtgggaatggtagtgtaatgatgatgtaggtggaggtggtggagacgctgtggtggtggtgatggcggtgaaagtttagatggcagtgagggtggagatggtggtggtatggattttggtggtcacggtggtatagatggtggtgagagggtaagggtgtagaggaaggtagtggtatagatttggtgatgggggtatgggtacagatggtggcagtggtgtagatggtggtgatgagggtatagatggtggtggcatagactttggtggtgatggtggtgaggttgtagatggaggtcatcgtgtagaatttggtggcagtggtagtacaggcggtggtagtgctagtgcaggcagtggtagtgtagatggtggtgagggtttaggtgttgatggtgagggtacagattttgttggtctagatggtgtggtgagagcgtagatggagatactttagattttaatggtagtaaggttggagatggtggtgagggtgcaggttgtggtgagggtacaggttgtggtggtgaaggtgcaggttgtggtgggttgtgagggtgcaggttgtggtgagggtacaggttgtggtggtgagggcataggttgtgagggtgcaggttgtggtgagggtgcaggttgtggtggtgagggttgtaggttgtggtgagggtgcaggttgtggtgagggtgcaggttgtggtgagggtgcaggttgtggtgagggtgtaggttgtggtgagggtacaggtggtggtgagggtgcaggttgtggtgagggtgtaggttgtggtggtgagggtgtaggttgtggtggtgagggtgtaggttgtggtgagggtgcagcttgtgagggtgcaggttgtggtgagggtgtaggttgtgagggtgtaggttgtgatgagggtgtaggttgtggtgagggtgtaggttgtggtgagggtgtaggttgtggtgagggtgcaggttgtggtgagggtgcaggtggtggtggtgagggtgtaggtggtggtggtgagggtgcaggttgtggtgagggtgcaggttgtgagggtgcaggttgtggtggtgagggtgtaggttgtggtggtgagggtgcaggttgtgagggtgagggtgtaggttgtggtggtgagggtgcaggtggtggtgagggtgcaggtggtggtgagggtgcaggtggtggtgagggtgtaggttgtggtgagggtgtaggttgtggtgagggtgcaggtggtggtgagggtgcaggtggtggtggtgagggtgtaggttgtggtgagggtgtaggttgtggtggtgagggtgcaggttgtgagggtgcaggtggtggtgagggtgcaggtggtggtgagggtgcaggtggtggtgagggtgcaggtggtggtgagggtgcaggtggtggtggtgagggtgtaggtggtggtggtgagggtgcaggttgtgagggtgtaggttgtggtgagggtacaggtggtgagggtgcaggttgtggtgagggtgtaggttgtggtgagggtgtaggttgtggtggtgagggtgtaggttgtggtgagggtgcagcttgtgagggtgcaggttgtggtggtgagggtgtaggcagtggtagaagtagaggtatcgtgctgctggtgtgtgtgcttatggtggtagagaacgtgatgggaatggtggtagtggcgatgatgatgtcctcatagttgtaaaacaaaattttggttattttcacttctctagtctggaaaagagaattttatttttaagtcttaagcagattgcgactacccagattatgaaatgaactatcccctctcttagccaggtaggaccttggtatttagtactttacctcagttacctttctcttactatttctgaaaaactgacatcttttttcctcgtttaatttctttaaggttaggagaattactctctaagtgtaacgatcaattcatatgagaattttctttatttctgaaccatattaacagttttcctcagttgtttccaaactctgccagttgttcttttgcaggtacttctctttagttgaccttccaaatacttttatcaggcatttaaattccaaccaatttgtagtttttagaaaagtttcttctcccgagtcccttactttccccccgctttccccggtcaccctgcctccttcctgccccctcgccagaagacattggttttcctgctgtcctatgtcactccggagaagagggagcaagaggctgcctttacccatcatttcttttccctgtcactacctgttagtaatgttaaagacaggtcctctggttaaaacggtttctgtagaaagaggatgatcaattttaatttcctttcccaacatgggctttgattttctgttttcaaaaacaggatacacagtgagaaatgctgggcgctccccactttgtgacctcatctacgatgagttatgacgggttaattataactgcagggaattatgcttatatcataggagattgatattttctgtgaggaaattagaaagctgttaggaaggcccagaacatgcagaaagaaaaaaaaaacctcctttgaggcagagttaaaaaaaaaaaaaaagtctggatcaagtgatgtcgtgcgtgctcagtctgcaggtgcttgctgacaatctagtctgtgtggttctcagaggacatttcttgagagttgtaatggagtcaaggtgaatctgccatcggggattggcagttggtgagcttggaacattgggcacatttcttctgtccacacctcagttgctcatttataagacggggctgcaggagtctcccacccgcagagtccttatgggagtggatgacagcatgcgagaagccctcggctaggcacagggggctggaggtggtggcagctgcgccgctgttccctgagtccagcaaaggaggccgcaaggctgtggggatttgttcagtttcctgctggcagtatgccccctactgaccagtgcgcagtgtttgcctcaatagcctcagaggcgttttggtggcagtgagggtggctgtgttggtttatttgcccagggctgcttaaaaggtcttggggctggagaatgatggattattgcaatagtcagagatctggagtaatatacgtgctataaaacaaaaaaggttttgatgaaaacgtatttttaaatagtcatttatttggtagcatattaaacgtcggatgtggttgcttttctgctaaaaagtcattttgaaaatagaaactcaaggaatgcaggaaacctgggtgtggttagggcaaggtctggaaagggccgttccgtatcctaagcaacgctaacaccttgttaaggcttccagcatagagaacaagcaggactggataaagcatatccgcgaagtcatccaggagcggacgatccacctgaagggagccctgaaggagcccattcacatccctaagaccgctcccgccacaagacagaagggaaggaggtgcgtgtctgggcgccactggaggtttgtggatgtgggagggaggggcgaggcggtgttagctcaccctgcttcaaaaatcctttctctcaaacattttgaggaatacattttttaaactgccatttgtggataacatcattcttagtaatgaaactgctttgtcagagataagagcctctattggcttagagtaaacgaagggctgtgtgcaaacctctcattgttttgcctttctcaccccgagcaccatacagggcacatgtctaactcatgcacatgaccttggataagttataaagcatcgagatgttgctgttttctcatttttaaaatggcaacgatcatatcaactatattttatggtgatgggaatccaacaggatgatatgttttaaacactcagcacagtgcctagcagaaagcctgtgctcggtgaagggtgccttaaccattgtccgcatcctggcagcagcaggcactcacgaaggctgatatgcacctcattaaacaaatcagttgcttctccagtgactgccagctcagcagcatcaggaactaaaagtttctttgcaccgccagggatggagaggatctggacagccaaggagacggcagcagccagcctgatacgatttccatcgcctcacggacgtctcagaacacgctggacagcgataaggtgagtcactgccggcactttgtgtgcggaggggaatgtggccagtctctggtcaaagcagccccctcctttctgttactcacagtttgtcatcaacattttcaagcagttgatacgtgccaggagtggtgccaggatcccgtggtggggcagagacttgggggattggggtgagaagacctgaaccctgaggattcaggagaaatcattcaactctttccatcctgccctttgccagtgccaagggtgttactggacattcgagggcagcatacttagactttttaatcttattcctaagcagaagaacctatcatttaaaataaaatcctacacagaacaccagcgtatgttttaatttaggatctttaagatggacagcacccttccagcgactaggagggacacaagatggaaataaagagtgttgcttacaggttctggggatcacacggcatccctggaggacagggagcatgtggggagagaggagtccttgggccaggccctttattgtgtccaggacattatccaaacaggtttggcacagggcgtctcaatgagtgggcttagagcaagcagacacgagtttcagaaggtcatgctgtgactaggaagttgtcactctggcatatctgcacagtccacatgaggtgcgagtgtcagcagggccagttaagcaggtcttatatggctatcccttagagaaatggtcaccagaaggaagttctgtgaagcagagatcaggacctaccacactgaaggcctgggagaagatgctcctgttatgagaaagtccagcttctctgggttcatagtgatgccaaggcaatgtaaaatagtaagaactcatggcagtgtagaagcggagctgctctgatggaaatgggggctgtggccctgagatgccctctcataaccatagtgtgcagcagaacatagaaaacctgccctggaattggcaacagtgatgaccactgtgagctagatctgatttttatcaaaaaagtttgtataggtgtatcttcttcagaagcagcctagagtatctcatgattttgtctgatacaatccaaaaatcccacaaagtaaattgctagtagaatttggaatcctgggtttacgtgatggacaaaagacaaaatgttctctgtcagccagtggggaacattgatcttaatgaagtcttctgttcctgccaagactagtgtgttctgttacattactagaatgctagactgaattctttttaaaaaaattgacagtaaatagggggtttatttatgagcccagaattgctgagcttctcattctccaatgcaagtcagacctcatttcatgagacctttgtccccatcatgagacccgggagtctgttctctgcacatcatttccgcagcccactcattggtaggaaggaacaatgccctgacctcaccgtccttgggaattgattcagacagatgacagagtccagtatttggaaggttatttccgtggcacatcttttagtcccagactggccttttctcacttggttttgtaggaggattcatgatacttaatgttctagtttcaaggacgggagtcagtagatttaaaatactgctctgctgcagtgattccattttcaatatcctagtttaagtgattagattttttttctcattatactttttgggttcactaaataatagatcctaggacttggagtggttagaatgacaagaccagagaataaaaagaatttctcattttattttgttcaaggccctatgtattggcattcagcaaatatttcttggcatgtagtaaaaagaaataagataaatgacatgttcaggcatctgatgcctgatagcatttctctccgagaccccacctatggccattgaggttaaagaaataaagtttgagcttggaaacactttgttagagtaatattgataaattttttattttattttactttttaataaagtaatcaaggggattatctggtgaatttccatgaggctgccacctgaaaggaaagttgaatcatgggtgctcaagtgtgtgggaaagtggcccgcattcagggcatttccagaccatttgagatcaccgtcaagccccaaattcccattcttaagataaactcctaggggtctgctctggatttcccctagacatgagttcaaaagtttattctttttttaaaaaaaaaaaagtaaattttttgaatgaaattgctaaagagctaagtggaaaagttagctttggagggttccttttttggaagttggtctaagaggcaaggataacttgtttcctcgggtagtttatggataaatgggtgcctgggagtctggaaatgacccctctatccaggaaggggctctggagtctccagttcattattccggacagagttgctggtgccacgacttatctcctgcgtgtggagaattccttggctggtacccacctcctctcagccccagcacagccctggcccctaaggcgcgtggctgattgggattccccagcggcttgaacagaaataagtctctatcctggagttaggagtagtgaaattagcacgacttcacatctgttatagcatattagggagggcttacgtgaactgggaatacagcaaattatatttgtatccaacgaaagaggaagaataaatcactaccagaacagtataggtttgccaaaaaaaaaaaaaaagcaaattttaccctagcagtccactagggtatgaaaatgttaagaaaactccctatgagatactctatctgtgaagatgattcaccagtttctcttgacctcatctgatgtgttgtccctaaacttcactcctgagctcagaaatccctgaagggtcggctgagcacgcggtggctcacgcctgtaatcccagcacttagggaggccaaggcgggcagatcacgaggtcaggagatcgagaccatcctggctaacatggtgaaaccccgtctctactaaaaatgtaaaaaattagtcgagcgtggtggtgggtgcctgtaagtcccagctactcgggaggctgaggcaggagaatggcatgaacccgggaggcagagcttgcagtgagccaagatcaggccactgcactcccacctgggcgacagagcgagactccatctcaaaaaaaaaaaaaaaaaaagaaatccctgaagggtctctcctgccagttccaccattgcctctccagccccgctcctgggaggctctttcttactgaggaccgcagcctgccacgcagcaacactcaccctggtattctcatggttaaccatcttgaaggaatgacactccagactcagtttcttaaacagacctggcgaattttcttaatgccacttgctgagagcatcggtccttagtaggctctaaagcacagaaaggatgaaatgtcgtgtcgtgagaacagaaccacagcgggtgtcttactccgttctggagacctgcatttgggattaaacggcgtatgagacttgccaataagtcagaatttggaatttggagaggacgtacccatgcggccttacaaacaagaaggtgcacgtttgctgcccacgtgtgcctgcgtttgtgtgtgctctgcttatgtgacgttttctcttagccatctccctccttatgcctctccagtagaacagttgagggtcattagatgactcaagaacacattttgaaaatcaaggactccatcctttccctagtcagtctgcaaaatgcactgtccctctgaactaggcttaaccagcaaccccatctccggtgacggtaattttcctgagtctcgaagttctttctgccctacgtagtttaagtttaagcagcctctgataacgcaggcagatggatctggcaagggaaatcacttaacgacattctgcctgttcgacttaatttatgatgtctgttattagttagttgttatcatggaatttggtttcatttcagaaactgggtcgggggatgtttttgactcggcctcttggagaattctgaaggcaaaagttatctgctagggctgttagtaattctcagatgaggcacacaaggtttagggagagtctgaaggagggaccctggagacgccctctttccagggagcactgtcagcagagcggggttagccaggccacggccatgagccacaggccccagcagcacgtttcctactttgaaaacatcagttttaaaatatgccttctttttgttccagaagtgaatttagtactgatccttgctgatctccatggtacttaacctgacacaatgatcttatgaaaatataatttggattccaaagaaatcaagcgctttccagattcttatctcatctgtcctgagtgcatctccctgcggtagggaggagagcgctgagccgggcctggggcactgcaggagatccaggccctctgcaaggcctcccagcagcagagggccacagccagacacggaacatgcatttaatcatctgtcattttccaggccttattatttcatgcaagagctgaatttggagctcagtatttttactaaagacacatctttaaaaattttttccctgtctcttccttattagtctgtgatttataatcattaaactaaaatccatattacaaagaaaatagaaaacatggaactcaaactgtattgtagaacaaagcatcttgaggccaacatggaaaaatggccgaggcgagatgaggtatcctgtggaaaagccggcccgagccagcagggcccaggtgtgagctgtctttcgaatcttaagccgtatgtttcttatttctaatgagtgagaaattcagttgagactgataacttcatgtggaacccccttcccaagcttataacatgaatatatggattcacatatttaaaaacataactggtttcagtcactctttttttaaaattcctgaggcaggatctcactttgtcgcccaggctggagtgcagtggtgtgatcagagctcactgtagtcttgaactcctaggctcaagtgatccttgcctggccccccaggtagctaggaccataagtgtacactactatgcctggctagttttttttttatttttgtagagacagtatcgaactgtgtttcccaggctggcctcaaactcctgacctcaagcaatcctcccacctcagcctctcaaaacgctgggattattgtcctgagccccactgcatccagccagtttcagttattcttaatgaagccttagcaccgtgttggagacatgaggttctatgtgttgttttttttctttctttctttcttttttttttttttgagatggagtcttgctctgtctcccaggctggagtacagtggcatgacctttgctcactgcaacctccgcctcccaggttcaagtgattctcctgcctcagcccctcttgtagctgagattataggcaagtaccaccacacccagctaatttctgtatttttagtagagatggggttttgccatgttggccaggctggtctcgaactcctgaccccaggtgatccacctgcctcggcctcccaaagtgctaggattacaggcgtgagccaccatgcccggccacggttccgtgtattttaaaatttagaaaagcaatcagctctttctgtcaagtgacgttctacactccaggaacttggtttgacttacataaattgcagcgtcgaggtagtatgtaaagtagttaatgccaatacattttgaaatatggcctaattcaccatcttgggtaagggtgtatatctatctaatgatgcttgcattcagcctcccgaggttgtcctgcagtcctgcgttctgcctctattcaccacatggaaggcgtagggctgctcggccaggcacagaggtgtcctacacccttccctctggctggagctgctcagagaggatgctctctgcctcctggccagctcagggctctgagtttcccaggacctcagataagtttgccccatgtaagcatgaaattgagtcatttaattcagaagccttttccacaggatggtgcttattttaacgtcctttataaagagcactcccaaccgcagttgaccttcctctgctcagagtgtacctggcagtggcatagcatatacaacacacctaagagcaggcaatcaaaagcgaggatgtacccaccagcaaacctctggcctctgcctcagcagctggtggtcttgggcaagtcacctcacctctctgaacctcagtttcctcatctgtaaatgggaatgatagtactgctcacatatatttagatcagtgactagcatgttctaagcactgaataaatattcagtttctgtgtctccgttatacagatggcttcctcctgcctcactcgggctattggccggcattgctgctgttgcaggttactgtcaatttcagcctccccttccttcatctgcacactcttggggctacagtggatttagctgttgattgtattgtacttgttaggatctggaagctgtcctaagaatgaaatgttttacttcagtgcctggcctgatgaattgtggtggctcaactgcaaaattctgtgtgtggaatgggcacaattactgcagaagggggagagtcttgcgtaaagcacctttccagctgttccgtctttcatcctagctgcatgcgtatccagtgacctaatattcaaagggtgggttcatttattctcagatatgtattggccacccactgtgtgccatccctatgataggcattcagcgcacaagaatgaatgaaggagacagagccccgctcccctggcgagctctgagtgatgggttccgtgtgacgtctgcttccttcttttactcatctttgttttctgtttttctaagtgatgtggctttttgtatatttttttagatgagttttttaagttctctcataaaaccacaaactgaatgtcatctttgatcatttcagttaccaaatcagaaaaacaaaatcccccaggcagaagtagaaagcctcagttctaagaaaagacagattttttttaagtttggttagaaatgttacaaattaagtgtttgtaaaatagtagagcactgaaaagtgctatttagtgtaaattttacacaacatgatcgaagttacagttggagatggtgataaagttatgtttcagactcgaagcaggtatttattctgattgctcttcctggtgagggcccagtcagctagttaacataagctggttgaggtcagctagttaacgttagatctcagatcattgtccctccatgaaagacaaaaagaggtatttcaaattaagcttcctcaataaaagattgctttggtcactcaggaaatacagccaacaggtttctttgggttaaatggtcctaagaagtttcttgctttccagagcctaggggagtgcactacgtgaggcaggtgtttttcaactgtttgcctcttccccgccctcgttcccttttccacttcatagccagaaagcgtttacctgccacgccacagggccgcctgtggggcctgcacggcacctccggcatttctcactgggatatgctaaaagcaagagtacaatgttggtccaggtgagcctctgtgaacccttgaagcctaatgcgagggagctgccacgtctctggtttgcctaccctttttagttgtatcttttaaatgcagccgtttttcatccagtatttcattccaattcatgtgtatgacaacacactcaagtcttccgagatcaatcttcacatcagaaaagcagtgtgtgagcatgtgagtagacagtagagggactggcatcctcaaacactgtcctcactccttcttttccagatacagtgttgagtatggtaagctgctggttttgaaaacgttttttctcaccgatttttttttctttaattgtggttaaaaaaaaaatgtaacgtaaagtttaccgtcttcaccatttttatgtcctcacaggtttctttctgtacccctagtgtatcggagcctatcacaatagtcctcctcttttaaactctaagtggcagattttagtgaacgcttcttcttggaatttgaccttatgtaaagcagcttgggtgttggcgtgagcacggagggcctgttgttcacgttagaacagctgctgatcagcccgagtctccgtgaagttgccctgtggagaagcttgggtgggtgagagcctggggcataatagcattgattagggaaattgttctggctgcctatagttacccttttttgtaaccattgctagcaatagcactgtactctctaattccctttaaccaagtaatcattttttggcctactctgtgtgaaaccttcacggaaccgcaagacccttttgtgaggtttctgaatgactgaactgtagtgggctgtaggctgtgacggttcacgggagttaatacactttgttctttaggggaaaatggcttttattaggccacattctccttttgcttttgaattgctctcagaaaattggtcagaacccacctgcaattgatctttaccacattagactcttgttcttgaagtagaattgtttgcagcgaagactgactgcatcacccaccacaccagtccgagagagccccctcttcctcaggcagagcttgccccagaactcatcgcagagcttggtaattcaaaccaggtattgccgccgtctatcgagagccatatgttcttgagccatacatgcctcattgttgtgtccagggcgggggtgttctgaggaacaaaggaagacgtgacaactcgcagtgtgagaagtccccagccacagctcttgttagttacagccattaactgcgttcgtgcaagacagtgatatgacatggtttctttggagaacatgaaaagtagaattctgttctatgtggtaattgttgaaggttcacatgcttgcaaccagagatgagtatttcattctctcgggtgaaacacagtaagttgtttattttcagtcattttggaaagaattcaggaaaggaaccgatttgattttgccaattgtccatatgtctgggcctaaagagggacttgggtgtagtctttggaggaggcacattggtggtgggtccctggcccctggtccaattaaggctgttttgttgtcttgcttgttagtcaccacattcatttttttaatagtgaaaagttgaaaggtttaaaaaaatctgtcttctgatatgaatctcgcaagtgttaatgtgagtcatggaaagtgagattttcacaaattgcaatcctaaattcaatgcatgaggtgggagcccatgatagaaacccattaaatatatagaagcaacgaagatactgtgagaacttgcacaaaatatggttagaaagaaaagggaatttttaaactagataaataaaatggtaactctttcaactgagggtagaaattctctgaaagccaagacctccgtcagacgtaacatacgagatagtggctgaatgttttctagttcggaatttaatttttcttaaaaagcagtaacgatttgcactgcttcctcaaaatagttatcacaagtcttttgtacacagaaaagttttttttttttaattagcaaacctggtttcaaagatgttttgcagcaagaagttaaaaatattcaaatgtgagcattgaggtgcatccccaggacagctcttctctgggctagaaaacacccatttaatcctcccctatggggcctctctttttgggtaaagccagttgatttgctgggagatgggaagatttttaaaataattgtagtgccctttgaaatattctgttgttggattttcttaacaagttcttaaaagcctttaaaaaggaattttaactttgtatatgattctttggcagaacatccttgatttttatttcttatgtgctgtcaagtacacagatgtttccaatagtttttgattactctttaagggcctaaaaaatcagtgccagaaataaagtctagcttaatcctccttcttcggcagcccctctctccccttcccacccttcccccacccgcagcccatggctttgagccgtctggaaaattaataagactctggagaatgaggcagccagagggcaggtgatgagacagtgcacttcccagcgtctgggagtgggggctgctagaagaatgtcagggaagcccagtgggtttctgctgggagcttctcacgtgcgctcagtgaagcagcgggtggcatcactggggagctctagccagacccagaggcctgggaagggcaggtccaaggggccatggcaatctgtaccctccttcggggcctgcagaccggtcctgtgttcccggaacaggaagcaccccagctctaagtcacgggactaaccactccatgagtgtggttctacaaggagagttcttttccaggctgggcctctgcctttgagcttttaacattagcatctttgactgttcagagacctgaaaaatttaacatgggttttccacggagaagtttgtaagattgagaaggggatttatgaaaattttccttgtggcctagcaaagctgattcactttgttgatactgtgcttcatggtagaagagtttggttttgttttggtctttgtggttgtctagtggacatgtgtttcttattctgaatatctgaactttctcttaaaagataggctcctacaacaggaggataatcaacagcacacagcatggcagaggctcccagaggtcctcagcacaagggggcagccccagaacacagcgggagtgtgagccatcggaggatgtgcgggctcctgggtctctgggtgtgggcttgtgctcagtggactcccaacaggaatgtttcccagcaggaggctgggccatttcctcctcccttctctcactcccacagccagccccatagcccgcagcacactcttgtgtccctgtagtttgtctgggctactgccctttagcaagaggtgacaggggagagctgagcgtctgcaggctaagcacaggcagagtgagctcctgaagccagtgaggaaaatccaggcttcgttttgggttttcaaatgcattgccttcatttttagagcatatgtatcttttctttttcatttcacaaatatttgaatgctagctggatgcggagcacagtgcgaggcaggctgaggaggagacccactcctaacagcttctgtaagtcacatgcctaccaccactggcactgggggactcagggtgactgtgcccagccccatctccgccctcccagtccagggatggaaagttcacagaagagtagggtgagcctgcttctggtgatgaaggcagacacacacacgtgtaactccagctgtggctcacttcagaattgaagtgccatggaggacaggcacgagagggacttctcggagccagtggggagcttagaatagaggggacgtgggggctttcagcaagagggatggtatgggctacttacaggcaggacccctcaggaggaggagggaggtgcttctggccactgggggggacctttgcctcctatgctaaggcctttgtgtgtgagggttttgcataagaggatgacgtgtttttagaaggtctcctgccagcagtgtttagatggcttggaaggagaacctggagtctgtgagggaggaagctcaggagcccctgcgggacccagtgaagtgattggtatgggagtgcagagaaaggaagtgatcggagagccgcgcaacatctgctcgacagcatttggagggaaaagagtggggttttttagcttgagtgacttgatggtgatactgttacccaaaagacaacaccggaagaaaaagagatttagggggtgggagggcatgatgagtcatgtcccagactctgcattgcggggacagggaagcatccagttgcccagcagggatcgaaagtagtctgcagttgggatgcttgctttgctcgggaggagtcagcttgagggtgtggttgaagagtccctgcagggggacagtggagaagcagcagagacagaacctgggacagtccagagaccaggagctgctctcgggattcttatgtagaaaaaacaatgaaaagattcttaggtaggagggatgttaatgagcgcatgagccctgtccccacggagtttactgtctaagggaacacacaccagggctcaggccatctgaagcagacagtcatgagaagaccatgcacttgttttaccggcagaggccatggggtgtgtgttgttagagagtttatggatgagctttgaaggaccggaagagtttcagtaggcctaggtgagagtgagcatggtaaaaggagagaaggagggaaaggaacgtcaggctggaggaacagaaggccagaaaatccaggacctctgggaaacgagccgatgtctgcagagcctgtggtgcctgctgcgtgttgaggcctgaagtgggggagcctagaaggaatctgagggcagagggcagagggcctcaggagccacaccaaggggagccctggacaagcaggaggaggcgcttgaaggattctgaagagaggcaggtgtgctttgcttcggtttcagggtcatagcccattgcctgttcagtcccgttcttgtggctgcctctttcctgacccaagggatgcttaaagagcccacatattccaaagcatggaacgcccaacactgggtcagaacagaaatttggaacagaactttatctcattttatcaccatatttcatgataatcccccagatagccttcaagcagagttttttttagtctgctgtaagttaaaaaatgagtgtatatataataccactttgtgaggaaggaaatagaatgtctcaggttcaagaaatttggaagctcttatgaaaaatcatattttcatacggagagtgcagtgatcacacaacctcggagcactcagctcactccggggcagggtggcaggaacccacctggaggacttcccagctgtacctgaaggcaccatggctcacactggctgacctgtcctctcttcctctgttccccccagctctctggtggctgtgagctgacagtggtgatccatgacttcaccgcttgcaacagcaacgagctgaccatccgacggggccagaccgtggaagttctggagcggccgcatgacaagcctgactggtgtctggtgcggacaactgaccgctccccagcggcagaaggcctggtcccctgtggttcactgtgcatcgcccactccagaagtagcatggaaatggagggcatcttcaaccacaaaggtaggaatcagtggggcatgggtggcagacccctactggaagtggccctggagcgctctgtctccgcgcctctcctgcctgttaatgtgcatgagcttccttgtcagctgtgccttcagcacatggtcactgactgtccgggcatttccagtccatcagcacctgaagaggaaatgaggatttcacccacgactcagaaataatgagtgatctcctcacttccagggcggtgtagtgagatatgacatcagtttagagaagaacactgattttggaacattccagttgcttccttcctttatcatctgtgccttcttctgtgtgtcatgatacctcctggaggccatcccctggctccagagggttagtcattccagggagctaatgaagctgcaagagaaaacagctactgagtagttctcctgattaattataggccaagccatgttccggatttctcaggacctaaatgtgagtttactgtcacttcggtaagaaacaggaagaattaggctgttgtttctccagaaatctgaagagaaaggcagaggattttcagactttggccaaaagccaaaggtgtccacttccatttctggtgaagctgcccatgcatttggaacagcggtgggcttcccctcgtggtgtctttgcatttagagatctgagccatgctggcttttagcctgttgccagaatgctttgcattcagtatattcagttgcatcaatataagtccttgaatttgagttgaaaataaagtacaacttttcctgaaattagtctgttctgcagaggggccctggtgaacttaagcatgcctcaaataacacttgttctgaaggatttcttccgcatgtgcctttcctgtggtgtgttcttacttcctggtgtttgcaattgcaggctagccaaggcgaaagaactaggcattcatcacacttggcttcgtccggaaaacttctggtggaggttgggtttttgaatgttgctacgttgtaccattttgtttttccctatgatactctccgatattcttgtacctggaaagtcactctgcccctcacaaaccctctaatgccctatttttaccaagaaggtgtttcttaatgagcaagacctgctgtgaacttatgccagccagtggttaggggctcagaactgtatccatttttttcttttttcccttatttaattatttatttatttattttattttattttattttattttattttattttattttattttattttattttttcctgtaatgcaaggaaactcataagattgttcctggccaggcacggtgactcacgcctctaatcccagcactttgggaagctgaggtgggtggcttacctgaggtcaaaagttcggaccagcctgaccaacatggtgaaaccccgtctctactaaaaataggaaaaattagctgggtgtggcggcagacgcctgtaatcccagctactcgagaggctgaggcaggaaaatcgcttggacccaggaggcagaggttgtagggagcagagatcgcaccattgcactccagcctgggcaacagagcaagactccatctgaaaaaaaaaaaaaaaaagattgtttgttcccttgcagtgttaggagctgcgcagcaacagacagcaggtgtgggtcagaagtaacatggaaacggagggcgtcttcaaccacaaggataggaagcggtagggcgtgggtgaggtcctgaccatgtccacgtccaggaaaccaggcagcttgaccagaatctctgtctaggagacagaggccatcatcaaaaagtcgggcaacaagggatgaggatttagacgtggagtccaacaaaagacataggaactgcaggagcaggaggcctctgtcccctgggaagcagagacccaggcttgcctctgctcagccccacagtcctcccccttctcctgccctgtgtgtgaagaggggtgctgcccccacgactggaaagacattggcatgtgccggcctgcccatgccagccatccacatgcctctgcccgtccactctctccttttgagcctcttttcagtataagagctgttcaggcttgaaggatatgcagcgagcgagttaaacatggcccctctttgcacaccatggcatgcatcattctggcagctgggtaagaccccctccagtatcagatgttcaggctgccttgcctcaccctcgcttcagaactcagggacggtatggaactggctttacagatttgcctcttgttgcttgctattaaagttagtttcttatatgtctctgactcttactgctctgaccttctaggcaggaggaaggagcaccttcattcagttctagtgtctctacattttcacaacctcagtgcctcagtaattttttcataacaccctgatccaactttcacatttttatgtcaaatgtaaaaaacatgcctattaaggtcaaatgactatttatttgcttgcgaataataagctgttttaaggattgcaatgagtctaattactcagatcagccaagaagggtccaggatcatgatgagccgtgctcaggttcacgtggtggttttgaagctgggctagacttggaagtctgtcggacactgagaatccatggaatttatgaagaccagatttcttttatcggctatatatccttaaaatgatttgggagaggataaaaatacagcttattttaaatgaacaagaaattcaattacacaatttgtttttcaaggagataattttgtgtctgaaacaagactctgctgtgaacatcattccattgagaaatgctatcttgtggccaggtgcggtggcacacacctgtcatcacagctgctcaagaggctgaggtgggaggatcgcttgaggccagcattttaaaaccagcctgggtatcatagcaagacccagtctctttaaaaaatgccatctgttttgtggacgaagtttgctttggaagcttgcatgtcccggtgtcctttgggccggccagccttcgtgtctgatggcgccttctgctcttgctctggctgtccttcctccgtctcagcatcttggtcatgaattaaacagacgccgggcatagcaggattgaataagggttcagcaaacccttgtgctccagcagtcttatttgtgtttgtcgtttatgctgtctgccgttacctcagaggctctggggctggggcctaggcctggaggctgtgtctgtgcccccagcgagtctcttctgcattctgggctgaggcccactcacctcccttcactctcttccactcgagtgtgtagtacgtgggctcactgttgaaatcggtgtcacgtcaccattgttgatggctcagtaaatccaagttctctttccttcccattgtctcaacttgtaaaacttgtcacttttatgtatttattgacagtcttggtcacaggaagtaaacagaaatgtcaagaatgtgtatatttccagtgaggccagttcaaaacatcctctttgccctacgctgccctgcttttttcaccttttccctttcttcccaaccaagagtcgccctacacaatggtccctggggatttagctccagtgtgatcggaaggaaaagtagccaggaaaaagcaaaatagtgttgtcacaaacctgggcaaatgagcgtctctcactctctgccggatgcatttctggagtgcctggcatgaatctttttgactgatagtgttttgagggtgggacaggagttcataccctgtcctggggagggccttccgtcaccctccccactcaggacatctggaaaaccaccccagggcctgtgtcccgcactactgctgcccagagcctttgccattcgaagttgaatctggaaggcccctctcagaccccatggaatttttttttttttttttttttttgctgaaataaggctttaaccaggagtttgagactacagtgagctatgatcaaaccactgcactccagcctggacaacagagtgagacctcatctctaaaaaataaataaataaataaaatgaaatgggctttaagaagagaccttttggtggcaagggaggagtgagtggtgagcttggaggatgcgttcttcctgtcaggaggcctgagatggggcgggcgcaggaggcctcccagggtcttgccagctctgacattctgagttcagagttcttagaaggctttatgagcaaaggccgattcaaaactgccgtttccttacaccaacccatcatgtgatgacaggtggcctttttgcttgtgctttcaaatatgtctagaagaaaacacccacttataaaaattaacctttaccactctaaaaggcattcacaattttaaagttttttctcctttggatagagaaaaagtatggttcagtacctgcattttatttcgaagaagttcagagtatgagtcatctgcagtgaatgagaaaattaaagggaaaaaaaacatgagaaataaaaccttttgcttgtgggtgacttgagcctctaaacccaggggctttaactcaggatgctacgttttactatggtaaaatctgtgccaaaaacagtcccccatagtttaccacaactccagtgggcactaccaagatcagctctcaggcttgaccagactggctgcagtagttaagagaagacgcagggactgtctttcgtaagtgtagtgatacatgattgctattaatcaaatggggcatttttttctaactcaagttaaaaatgagaaagagacatattttcattcggaactgtccgaaatgttgacttttctgtgggtccaccctgcttttctccaagctctccttgcttctctccaagctctctcccaagggttttcttgtccacccgaatagtttacttttccacttgactgtcttagcaactttttcaaatctgaagtattcagattccctctcccaccatctccccacttgttcacccaagaacatggctaacgcacgtgagggtctctccactgcccaccacagtttttaaaaactggtaaactccacataacaaaatgtatcatcttaaccattcttaagtctacagatcagtggcattaagtaccttcacattgttatgcagccgtcattaccattcacatctagaattcttttttccgtcttacagaactgaacctctgtgcccatggaacaaaaccctccgctctctcctcccagcccctggcactgcccctttcctttctgtctccatgagtttgactgttgtaggtgcctcatgtgagtagaaagtcatgtagtcttgtccttttgggactgtttatttcttgtagaagattccgtgttctgacttttgtcagaatttcctttctttttaaggctgaatagcatccccttgtatgcagatgccacattgagttcaacattcatctgctgatgggcacttgggttgcttctgccttttgactcttgtgaataatgctgctatgaacatggatgtacaagtaatctcttcaagtccctcctttcagtccttctgggtgtatacccagaaatgcaattgatggatcatatggtactgttgtctgaatgtttgcgtccttccaaaatccgtatgttgaaatctaaccgccaatgtgatggtattaagaggtggactgttgggtggtaattagatcatgagggcagagcccttgagaatgggattactacccttacaaaagaggcccagggagcccttttgtccttccgccatgtgagggcacagaaggcaccgtctttgaggagcaggccctctttaaatactaactctgccagcgcctggatctcagacttcccagcctcgaaaactgtcagcaataaatttctgtgctttataagttatccagtttaaggtattttattatagcagcaggaatggactaagacatatggtagttctacttttaattttttgaggctgcccactcagttttgttaactttatctcaataatatatttcaagtatgttctcttttcatttctaccgttactcgtatcacctgatcacctgacctcacttcttgccctttttcgtttcacctaaaacataaatgttaccatactctcttgcttaaatttctttggcgactttctcttggtcagagaataaaattcagcttcctcacatgtccaacaagacctttcgtctcatagacgcacatgtacacacacatgtgcacacacacgcacacctatacaccttctcttggagctgtacatcaggtaacataggggcttttttccctctcactcacccctacctaatagtccccgtctcatttcatcaaatacaaatacaaatcctcatgggaaaaataaatgtattcagtgagctcatggaagggaggagagagcagaataaatcttggtctagttagcaagtatttccacacagaggctcccatcaggtcagctgaaaagtccagttagatgaactccaaggaacgctgaagacccacaaggaactgtccaggaactcactgaaagcaccttaaacagattgtaacaggaatgatgattgcagatacactgttgaacttaaaaatgggatagaggaactgcagacaacacaggtgttttaaaccgtaggctcggtagagaaagcagcgagtctccgcagatggccggcactgagagccagcaagaagcggaggagatgggccttcagcagggggttgcggggggagctttaaactgagccctgtaaacatggcagaactgctcagtgggagactctcagcacagacggtcatggggaagtgagtgcagttcatttgtaatcttgttgtcgagttctgggttttttttgtttgtttcgtaactttaaaggtatgcactttatatagatttatttatttgctgggaccgttactcagagttcctagaaatgtacacagcttttttaccagggttactcctcagaatcacttgtcacttctttaaatgaatgaatgaatgtgccaggccctatgcctggaggttgggagcttcatctacatcacattctaacaggtgaccactggggtaagcactgtgtgactgcaaagccagggtgtgtttccatcaacacccagatgaccgtgcctatgtgcccctgttgtcctccctccaggactgcctcctcaccccacccctttctgcagctcctcatctaaacatctcgcctggtgaggtcacggcttagcctgttggccagtggccccaccaccatccttccccctgtgcagattggaggaggccaggtctctccccttagctcctatgtccccttcaccccccatggcacagatgagacattcacagagtttgcagatgatggaagagaagactccaggttgccaggtgtgtccactctcaggaacccccagcccaagcctcactgctcgtgttcccagccaaccccagcacgggggatacgccggtgctgtttccctgctcagaatacaaccagttaccagaaacgacctcacccctccaaccactttccaaggtgccaggacagagaagcccttcactggcccacccagggcagttgacagagggatgccctccttggaggggagcctcacctctacccacagggccgcggccttgtcctggattctcaccggggcagtcacgtcaggatggagaggtcccatgtcagccagttctttggtgggggtcatgtagtctgaaatgacctgccgatggtccaggctgagccagggaagccgagcctgggtgcctttttggtgcctactctgacttgagttggattcatgccacagacccaccttcttgagcaacaacacatatagccaccaacacaagagccagccacacactgagcagagaaagtccctgtcgcctcaccacccaaaaactccagctttgcagagaccaaggttcttctctacctttgcagaagcctctgtgaccaaacccggagcttgcccttctgaggcctctagcatttctccaggtgtttttcagaggacttggtttaaatttgttcaccccaaatgtggtctttcccggatcatgaaaggatctgccgcaaaggtgaatctgagtctcctcagagtcatatgagactgaaactgcttataacatttccgtgacctaataagtcttccaaaaatgtagggtattaagagtttagtgacattaaaaagtttagtcgaaaatatcgtgattcaggtatatttagacatttgattcatgccaaattgccactgttatcagaaaacacaccccaagcacattaatgcctagatatttcaaacccttttctgcccacacattcttaaaaataatatactgagaaatctatatacaggtttttttttaattagcttggaaaagagcagttgtattctgtttgaacagctgctaatgtcaattcctgtgggaagaaagaccaaagaacatggagttacaccaagaattttaaaacaaagacgctgtccctttcctgagcaccgtgcagccaagactgagagatcagtctgagacctgtgattaaggagtgttttctacatagcgtataattatggagccacacaagtgggccattactctgttgagtgcttcatgtttgaggtattttcgtgttccaactttacattaaagtgtttattaaaacaggaaaaatccacgagcaggtattgacactatccatattagatcatcacaaaattatatatatagcagagtcataaacaatgagaaacggtcttcccacacttgctttaaatggccatgacctagtgtttagggaaagcagtaaaatcagcgaggagctcgtgggaaaaatgagacgggccctgagggggtgactcatgggccaagcagggccacacaggtaccaggccgccacgtcctctcctgcctctcactctctggagactggacttcctttactgcctcctttctgacatttcctagacatcagactttgctacttagtacacaaacggggttcccttttaaatttgttcactctagttagcatttgcagaagctgtgaaaaattacagagagatgatgtgttgggtaagagatggtttaaaagtccagcttgctgtttttcattaagtgtcttgaaaatgagtaagtggcgttcctggaggggaacaatcatataattccgcagggtgggtctaaacttgttttctgatagtgtttagcagctcatggctctgagggcacctgataacacagcagccaggcgctgatgagaagtgtgtgccagacagacccgagtgtggcttggctcttgccttatgttcctttctctgttcagagaagcgtgagatgagattttgtgattatattgtactccttgggctgactttcccatgcacagaatgttttacacatcctgatagctgagctgaaaatgcaaagagaagggaaaatgccttaaattgttctggctaatttagaagcagcaggccttggaagtctttgtcctgtgtccctgaacaaatcttatgggagctctggtacctatgccagaaaatgcacataggcacaacacttttacatacacgttcacacaccccacccatatggagaacttttttctaaataagagaaagaaaaattttaagacttacaagttatgtttaggtattttacatggttcagaaaacaagacatgaagcggtataaactgagaagtcttgttcccacaaccccacgtgccaggtacacataaccatttttattcacctctagcttgtgcttccaatgtttgttaggcatatgtaaataagtgaatagataagcatttctccctccttttgctgacatgagtggtggcatgttttgctcctggcttttatcccttgaccccattccagtacctagagacctgcttcatttttttagatgtgtaatacttcatgtgtgcgtgtgccttagtgattaactcgtgcactgtgcagggacatcgggctgggatcagtttgttcactgatatatacagcgctgcgggagataccctcacatgtgtatcatttggtccatgtgcaggtgtgtctggaagatagaattctaggcgtagaattgataggttaaatgtatttatagggaaaaaatcaatataaaactttgcgtgtaatgatatttgcgtgcttttttttttaatttttttacccaaatagcaaaaaaaaaaaaaaaaaaattgtcctttttgaatgggcctctttaaatccattcatataaattatatcttgagtctctgtgtgacctgtctgggaggtgaggtttggatggatgttttcccacagaattacaagagcatgcaatgaaatatttatgtaaatcatctttcatcaacatttttgcgcttttattttagggattctccacataacaaataaatggcagtgatttccaaagagcaagtaacttcccttccctcagtatgtatataaaatagctttcatggtgccccatacgccttccatccttgcaaagttcttcgtgaatccaagctatgcagttgcaagagatacattcacaaggctgggctgttgatggctctcctagtgggccttggagtctctgtataatctccgctctttctgaaggattcagtttcttaccacaaacatttcacagtgaatttcgttttattttattttattttattttattttattttatttatttatttactgagacagagtcttgctctgtcacccaggctggagtgcagtggcatgatcccggctcaccgcaatctccgcctcccgagttcaagggattctcctgcctcagcctcccgagtagctgggacctcaggcacccgccaccctgactaatttttatattttaaatggaggcggagtttcactatgttggccaggcgggtcttgaactcctgacctcaggtgatccgccttcctcgacttcccaaagtgctgggattacaggcatgagccactgcgcctggcctgaattttgaataagacagtttttaaagctctcccaaatctaacttccttccttcctgacactgtggaagagttttgaaggggacagaaaaaggcatgggggtaggaggctaccctttgagctcttgcccctgtggccacctctcccaggagaacatcctcacgcccctttctggggttctgtgtggctcatgctgggctggctgcctggggcttctgagacgtgttcagggtctgccctgcttcatcgtggtctgaccagcagtggctggaacacctcagacttcaggcaattggtcattccacatcacagactattcagggggcatcatcttcccgaaacctttctagccaaacgtaggacagggcccccaaagtgtttattatttgaaggtcctttcaaacattcgagaggacagtaaacaggctcgtttgccttggctgcattgcacggcggctctggaattctttattatttttgtcaagaaatgaagccctgtgtgttcaatctcatctattctctccccaaccccttttcaggagtctgtagaatttgaatgctagaggggaagaatattaaagttctgttcttagatatagatgtgtttcctactgtctcaaaaacatttagatcatttcagtcctgtatcatggagaagattattaacagaagggggagaagggtgtattcatctgctggctgccatagcaaaatcccagagcctgggggattaaacaacagacatttattctctcacagttctgcaagccagaagaagtctagaaggagtcagcagggtcggcttcctctggggcctctgtccttggcttgcagatggccaccctcttgctgattctccatatagctgtctatctccctatttccttttctgtaagaacaccagtcaggttggatcagcacccaccctaagagcctcattttaatttaatcacctccttaaaagaccttgtttccaaatacagtcacattctgagatactggggatttgaacttcaacatggattttagggggacacacttcagcccatagcaagggggccattggagccttaagaaattaacagtagtaacagagagcatggggtgcggacttgccattgccagccacagtgctgttctctatgttccaccctcaagataccctcatgacaacgtagacatacaccattatcatccccattttagggtaggaaaagggaagcacagaaaaatcacgtaaccaaacatagcaggggacgtaaagtgagattttcaaagcagcagtcagacttaagatagccactgtacatactgctgtctgtgcacgttggaagaaacctttggtgcagggaggaagctgaagcccgtagagacaaactcagttgcccaaggccagacatcgtttatggaagagctaattctagaacctggtgtcctaagttcgctgcactctggctttgcccattcttgagaggccatgggccctccaacatttcgtctctatgaaaaagatcaagtttcagatttccagtttgaattgtgatctaataattccaaatgcattccactgcccagagaagtcatcttaatggaaatctttttttcatctttgggggccagatttctcctcttcctactcccctagttgattacagaactttactcacaatgagcatgttatgtatgagtgaataaatggaaaaagcaatcacaaaggaaaagccattttttctttatcagtttgcatccaggagtaaaagatttttgccccaaaactattattctgccccctttcctaaatcaaaatcagctgcttgttctcctttgctcttccttaaaggagctgaagaattcaacttcctgtcagctccccgccaccatcaaccctgtgaattttagccctatatctctcattctctgaagtttaagagaaatgggacatcaaaagcacatgttggcagtcaagagttagctacatggctcttaattttttgagcactgttgtttttgttacttttttgagaaacacgatttgtgaggttaccatatcacgttgcagttctgtaaataatccacaatgctggtgcaaacagagaatgtcacatagttaaagtgaaatgtaaaaaaggagtatttgaatgtttggtttgttaaagaaagagaaaaactcacatagtttgtgaaaagatagtaaataaagcaatgaaaaggagcctatcgaattcttggcacccacatgaagagtttgaatgcctccataaaggtgcttttgtggattggcaactgtgctagaaagcagcaggaactcctgtgctgaatggagccctaagaagcaggggtttcgtcatccctttccctccagagcaggaggtattatctatggggtaaagaaaccggagaaaacttcctctgaacaggagtatctttgtgcatggaacctgagagactcaatcctggtggtgcagctgtgcttgaagccagcactgtggacatattgtgcagagcggaaacgcatggggaagaaaacaagggccagggaggtggcgaaaggaaaacagtccagaattactactttaaaaaaatggtatgacatttcaggggcccagcatcctcagctgcagagctgtgtgctccttttaataattggggtttgaggactgacttcaaggtagaatactgaaattttatcagtattaatcaagtctcagaaaacactcctgatttttagaggaaattataatattcctaatcattatatcattcaagatctaatctcagaattcagctaatgttgttttatatatccagtattttgattttgattttaaggatcttttcattctatattaattgcttaattataaatatatgtttactcaaaaagcatcataatttcaatagaaagacttcaggtcctttggctcatcttaattttagccttaagtatatttctagtcttcatttttaaagcaccatttgtatattgatcctttttactgcttttgttttagactccttttggcagaaattacttgtctcattttttatgggcagattaataacagacacttgaaattgaagtccaaattttaaatatttgagaaataattgttacaagagaaggctacataaaaagtaaatttcgtgggcattaactttgaccatgaccatatgagctgcttttcaactaatctaaataaaaatactttaattttcacgaaaataagattgactattgtaattttgttcattcttttgtcccacaaaagtatgtggaaaaatacattttgtattgtgttccttcagtacatttttttcgataatcataaacccctttatttacagatctttaatttgtctgatacgtttctttttctacaaagatcttctctgactttacctacttttttctggtaactttttcatactctcagtttctttagctatttgcatttaaataacacaacactcagttttttttttatttttaaaaacaattatgaaataattttggacctacagaaaagtgacaaaaatagttcagagaatttctgtacaccctgtacccagctcccccaatagtaacatctcacatacggtgatgaaaatcgggcatgaacccgaatgcagtgctcttaactaagccctgggccttatcctggattttgctttcatgtcctctctctggcttaatagtcaattaagaatccacattgtatttatttaggttgatgcaaaagtaattgcagtttttgccatttcagtggcaaaaggcacaattacttttgcaccgacttaataatttcccccaatctgtagcagctcttcagtcttttttcttcttcatgaccttgacaattttaaggcatactggtcctttctgtcataagatgcctcccaatttgagtttatctaatagtaaataaagcagtgttttctcttaaatttagctcatgcatgttgggcaagaacagcactgatgctattgtgcccttctccgtgcatcacgtcaggggtacagggtatcctgagacgtctccctgtcggtgtgtggaccttggtcacctggctaaagtagtgtcgcaggacttttccttagttcagctaaagacagggtcctcatccatcccatggccacgaaaatttaggcttgcagatggtttgaaggctgagtacagcagggttttattgggtgaaaagggaaaaaaagggggaaagaaggatcctccacgaggccggactccctgctagagcacccgcagtttgaatcccaggttccacacaggaagaggagaagctgagctcctccccgctgcaaagggtgcagacttcccgaggctccaccacaatgtgcaggctggttggagtgtttccagggaccccctttcacctcactgtctcagtagcatctgcagcatttcccccactgtaaagttactgtttttctctttgtaattaataaataccttgtggggaaatatttttgaactgtgcaatactctgtttctcatcctacctttaccctctaattttggcatccctcagtagttcttgcctacaacactatagtgcttacctaatggtatttcatagtttcctcattccttctgaatttatcagttggaattcttctataagagctgtccctctgccattctttacttatatcagttggagtcgtggatacttattgtgtggatcataacccagtgctgtcattgttttcttcttagattgttccagctgtggctatcaggagccctgtctgtgaacttctgacgtgctcccaacttgttttagagcactcctttactttctggcactataggatgtaccaggctcatattgtattttgcctgccacagtcctggagtcagccatttctccaagaagccctcctggtccgttttgttggagaatggtcttagaaactaaggtttgggtgctaggtatgctcattgctgtgtgttgccatggcttcaggccctcttagcagatgtgtgtgtaccaacccatgcatacataaacatctgtattttctgtttcccctcctccatcctcccctgcccccatctccgtctcttcttgtattcatctgttttcacactgctgagactaggcaatttacaaaagaaagaggtttattggacttacagttccatgtgactggggaggcgtcacaatcttgatggaaggcaaggaggaacaagtcacatcttacatggatggcagcaggcaaagcaagagagagcttgtgtaggggaactcctctttgtaaaaccgtcaggtcttatgagacttattcactgtcacaagtacagcacgggaaaaacttgcccccatgattcaattacttcccaccaggtccctcccacaacacgtgggaattcaagatgagatttgggtggggacacagccaaaccgtatcattccacccctggtccctcccaaatctcatgtcatcacctttcaaaagcaatcatactttccaaacagtcccccaaagtcttatttcagcaataactcaaaagtccacagtcaaaagtctcatccaaaacaaggcaagtcccttccacctatgagcctgtaaaatcaaaagcaggttagttacttcctagatacgatgggggtatagatattgggtaaatacagccattccaaatggaagaaattggccaaaacaaaggggctacagaccccatgcaagtctgaaatccagcagagcagtcaaatcttaaaactcagaaatgatctcctttgactccatgtctcacatccaggtcacgctgataggtgggttcccatggtcttggacagctctgcctctgtggcttggcagggcaaagcctccctcctggttgctttcacggactggcattgtttgcagcttttccaggctcacggtgcaagctgtgtcagtgggtctgccattctgcgggtctggagggtggtggccctcttctcacagctccactaggctcctgtatgtgtgtgtatgactttacatcatactgaagtgtctgcaatctatcaacaaaggctttattctaaccttcttcctttcctcatttgtaacctctttctttgatagtaagacacttggatttcattctctggaatgtgattatttgttccatcctattctaaaagttctttttttccctctcctgtttggatattgaattttttactaattatgactgtgagactcagctccacccattctcactatagtagtttcagaattgctaacccatactcatggaagaaacttacagattttttttcctttggttttacagtatacaatcaaaaagctgtttttcaaagttaggttagttgttttcttccccacccacctcggggtgatgttgttcagctgggttcattggtttctgcgtatttatattccatttggagtatagtacccctcacacactcatgccctgatgagctgtgcctggggcagctgtaacaaagtaccacacactgcctggttcaaacaacagaaatttattttctggagactgagagttagagatcagggtgtcagcagagtaggtttctcctgaggcctctcttcttggcttgcagaggcaagaactttcttctgtgcatgtctgtgccctcatctcctcttcccgtgaggacaccaggcatattggatgaggaccaccccccccgccccaaggacctcattttaactctttcacctctttaaatttccgcctcaaagcacagtcgcattccaaggtccagggcttgggacatcagcataggaattggggaatacacagttcagcccgtaatcccaccatcctggtagattgtaatgatttggtttggggcgatgtgaaatatggccatgatgttaagagtcagtgcccaatttgcttgacatagatatcacccttttgttccttcccagcatctctagctttggtcctcagagacaaacgttatgtccttaaagcagcactatcttgatggatcttctgttctctctgtgacattttaaattgtgtgtccagccatcaaagtaaaatgtcaaaaattatcaaaaataccaaaaaacagaagttcttgttttccttcacaaactccgttaaatttctacattacacgtgttctcttccgccaagtgcctgtgacgtttgtctctgacccaccccattcgctccattttcacatctctctcctttctttgcaaaattcaactccatctgcactaaacctgtctcactgtttcattccttttcgaggtcctgttcattgacaattcaggcttctgacatcatttcctgaccccctttacttacttgctaatgttctcacacggcagatagactcattcagcagatcaaatgaggtttaagactcaaagctttaacctcattgtcccctttctcaagcctttcagtagcttccagtttcctttctggttacatcacattgtcgcttctgtaatttgttcccagttaaccaagtcacccacctgttttcacctccttctccttcccaccctcacggccatggttttgaaccagggtttcttcccacggtctgttgaggtcactaacccctgtgtcgtcttctcctgaaccgagtctgttcagattctcagaccagatccctggccatgccaccatggtagaaataggccttggcgtcaaaacttatttccagggaaattttgccagtgatttggacttccttcctttccttttgcctcgcctcctctcccatcggtcatttactcacctccgcatttccgctggttccgcgtttctgtctagtggctcaggttgtcgcccttcagggcatgcctttaattgagataatttctctttacttactgtataaaatgccctgtcccatctgacacgctctgcagtctctcacctacatgactggaaggagggaggggacccagaaggcgtcttccttcctcactccctcatctgtgcgatgctacacctctgacagatgtgaacttgagggtttttttttgtttttgtttgtttgtttgagatggagtctgtcacctaggctagagtgcaatggcacaatctcagctcactgcatcctccacctcctgggttcaagcgattctcctgcctcagcctcctgagtagctgggattataagcatgtgccgtcatgcctagctaatttttgtatttttaatagagatggggtttcaccatgttggccaggctagtctcgaactcctgacctcatgatccacctgcctcagcctcccaaagtgttgggattacaggcatgagccaccgcgcctggcccaaacttgagatttgaagtgatcagtccctagggaaatttcccatacatctttagccaaaattattgtactcatttttaagcttaatcctcttttctttcatagagaacttatattacacataaagtaattaaattccctgacagctcttttttagtttttaaattaatggcccatgttggcagtccgtattttggaaagggacaaagtcaactttttaataacggttgtagtaactgaaaccttagaatgtcaattaacttgatttcctttaggtcataatttttagtgctttttgctaacaaaagaggaggttatttatttggcaataaagttgtcttctcttacataaaatgtgctctgtgcagaactctgcctctcgctgggtcctggcataagtacaccatctggatctatcacgggaccgtttaaagggaaaaacaaccttacgctttgcttttggtgttttaagaagaatatgaagcctaacgtgggcccataaatgccagactcccctctgcagcagttggtgagagagccgttggagcgcctgagacagttttctctgggtgccctggatatagcatcttgatttttatagtagttaattgtcttaaactcagaaagaaactagaagtctgtgctgttttcacgttctttttcctttgaggattttaaaattttattatgcaacaaatgtggaggtggggacaaaaccaaaattttaacttttttttaactgaggaagtaaaaaaaggcaacattcttcttagcaaagccataaaaaacagcacaaataaaattgtttatactgtcaagttagataaagcagacatgagaaaaattattaatataaagaattcaagatagtacatgttttcttaaggttcaacaaagaacacttcctcaaagaaattgtaagcagctcagagccacactacaggttgagatatgtggcgaatattccaggtgacttttcgtcagaccaaggcaagggcatccaggtctagtgtggagggcaccgaggaacaggggagcgcacacacaccacagaagctggaagtcagacccgacagttcccacgcagtggacattctcctctgaagccattgtgtggtgtgggacaagggagcgaacatatggaaactttcaaagagagagtaagaatgtttctccgctaaggaaaagatccaatttccaaggaagacaagaaagaacttctaagatacgctttcctaaaaactccttatagttcgcatgcaagaatttacattttcagttctctggctgcttcctgtgaggaagaatgaagatatgtttttaataagtgaggagcggcattacagcacagtgatgtaaccagttggctattaggccgcattacatttctttttttttatcaagtcacatcaggaggtgctgtttggtgtgtgagtctcagggcggacctccctccagatgtacacaaagcccaagtcagggaagccattcagaacggcctgcgtggggagggcaactgtcacttcacatttcactgagtaaggaaattgcagctctggctagtgcaggcggggagagacatctggtttccagggtgcctgaagaatttccttgagctccaattagagtcagtgtggtagaatgaaatccaccgcgtctgggtattcccacttgtgaaacccaactgcagcgcgcgcgcgcgcgctcagacgccagcgagggagaggcgcgcgctgggccgggccgtgggctggcgccggccgctgagcaacacgctgccagtctgtgtgcctgtccctgtcgcgtcccagtctgtgtctgagtgtctgtttagctggtcgctgcttttgctgccaagcgggtggctctagctgctgtggagggagaggtaggataggggttctgcacctttagcctccagtcggctccagtcaccatgcccaacggattgaagccagtggacacgctggactcgctgtcctctgtcagttcagcctactgcagcggcgggcagccgggcacctgcaagtactggatcctcgacctaggtacacaagctctctgcagatgctcgggctggcgctgctttctctctgcctgctttctttccagtggctgcgcagtgattgacatgtgctttaaaacagaaatgttttgtgcttggaacctgaaacgtgttccgtggtgaccaccttgggagggggctgtgtctgggagatggtttatgggggggccactgggaatgtgaggagcaactgggaacagagcactgcacatccattgtgtgttgtaagacctttttaatatctggggactgctttttattatccctttttcttataaatggcatgtaaagagtgtaaagtaatctgtgctacaaattgccttatgattttagttggctttatgtctgtttcaggtttaattttgtttggaggttttcagactagagaaaacaacatgtcctaacatatttagactctggctctccatgagaactacagccatatgataagataatacaaagttagctggggagagggatgcttccaacgttgccattgtattcaagggagtgtctgtgccagattctggctttatctgcggaactagggaaaagacgtgaagatgtgattcctgcaaaggttatttgagaggtcggtaagcttcactttgaggaaaaggcaacaggatacaaaagagacaaggtgaggggagttgggtctgcagatgcccatggaatgctgccctgttccagaggccagctttgtttcagtaacctttgacagctctctgtccagaccatacagccgaaaaaaggagtctctcacagggtgccacctgcatgccagcaggaatgctctctaccagaatttgggtcttggcctgggtcactttcagtgtttgccttcactttcttgtcagccgttatccgcgtatatgcttcggaagtgggcggcaagacgcagagagccaaggggatttgctgagacttaacggggcacttccagttcattaagagctctatggagaagggtctttcggggtgcagggatcccccaaagaaagggggtagggtgtcggatcaaaaggggggcacagaaaatatgtattgggcatctgaaggggaagtggcgctgcttaactctacccatttgttcatggaatactaggaggtaagagttggctgcgtgaatgttgcatgtgtggttctcaacatcattttcaataatactccttgtatttttgttcacaaaacctttaaaaagtctttgaccctgggctctttttgtcatatttatgctaattgttttaccactcgaagatggtgacctccctgtctgcaggtgtgcaagctgggtaggtccctcggggaccctgtgcgctaggaattcctgcactgggtgggttaaagtagatgatgcatctgctctcctaatttaatgtagtaatttctgtgcagtgcaaagaacaactggtcacatgaaaagtctgatttgatgcctcagccgctagctagctctgaatcttgagtaaattaccttctctctctgaacttctctttctttgtctgcaaagtgggagtaacaatagagcacgcccctcaggatatcataaacatccccaaagtttagaacaaaatattttaatgaacaatttttctaaagagtaatggatcttaagacatagcattctttctgtagagggaatttttgaatcttagtggtatcttaattccttcagaattcttctcaagggacattattaaattcgctttttaaagtactagaggataattgtgctgttacattttttgtttctctctatatatttttgttggtaattcttaaactattaagaagctctaggtggtgttcttcaagctgtcacctcagaatttttaagctaggaaaaattcgtaagaaaaattgatgacccgtgtggaatttcctgaacaaaaaatgatcacttcaccataaaggatagataagaaaaagcgaaattcgtgcatatgcgtgtgtgtgtagaaagtgcctgcccatccttttctaacgcttatagtaatttcaagacaatttcctgaatgctgttatatcagagtgatgttttaatattctgattttacctattaaattgattatggggaaatacatatgcatcacattttaaaaggaagaatgattctgggtaatatccaagaaataaatcccaaagtaactttacagtgcccatgaaatcactgagtgtgattgcaaagcccgtcttacacctgcaagcagtctggggcttcatgtgttagagtactttgggaaaaggcagttttcctgcttcctgaagttcattggggcatccccctgtccaaatgtgaaccagtcttgcttggagtaatctgcacagaagcctgttttatgtgctgacattgccattgtcaataacttacacagacatgagccaggagagttttactgctaagcgattgttaagaaaataagagaaggtaaggtcaagaagaactgtaaatcttcttttatgacgtttccaatgggagagcctagttctacggataagagagtggaactattgggttggttatcattctgaaatcagtattcccttttataggacagatggaatctattccagtgctatacgtattcccctgactcaagctcaggaaaaacataatctggtgactctccttaacactgaacagactcttacacaaagtgaactgtgtgctttataattcttgaattctcttgaagtcttttttttttttttctttctgtttgggttaggaatatggattctcaccactgcaatttttgtttttataaattaaagggaaacattccaaagactaaatataggataaagaaatttctttgctgaagaaatacataatatgaacctattctgaaagtatccaagtggatgaacagtactgcctcaaattaaagctgtcagtacatggaatattcagtttcacatgaataaacaaaaaccacagaagtacttgtcacaatgttggattgtttcgactgtgaagactgattgtgtcacacaagttgctgtgcaaactaaattctatctcaaatcgttttttgccctttaagtatctttaagtgaatggtttaagacaggatgtgcagtataggatagtgggaatggtgtgttgctgtagaagccagtttgtccctgctcacccctacctgtgtgatcttataagttcttgataatctcgctgagctgcagtttcctcatgtgtttaaaacaaacaaacaaaagaagatagagaatgctcgctattatggttattatgctctccaaaatctacattgaaggttctatttcattttaagcaaactgcattttaaaaataattttgttcccttgcttccatgttaaacacgaaaaaagagtgttacacattgaatttgtatatatttttagccaagaagcaaagaaacttgaagttatttggtattatagccttttttagagtgaatataaaatcttgaaatattagaatgtttttgaagttaatattaaaattagactgaaacctcccccaaaaagtgcccaagaaacccacaggtcccaggttaggagccttcaggcaaagtggcttttcctagttttggaattcttttcttatttctagacaaggagcaggcaccctcctcgtttaactgtaatctgtctttggtatgtgctctttctaagtatatctcttcactagattttgggggaacacaaatttatagtttttcattctgaaaaatttcctccaggtgctcaaagttggcctcagggacacgtgagcaagtccataaacagagtgagtcggcctgggagctgggtaacaagccatggaattcatccatggagtcttcctcatttcctcttcctgtctccaaggagtggcagtgggggctgggcagccataaagatgctcctattaattttttgcaattctcatataaaaccatacaaatatgagcaaaccacataccccccgccaaatatctagtttctctgaaactatatgtgctaagtggaaaactcccagacagagcgagcagcagaagggaacatagcacccttaggcagccactaatcacgttggacacatcttctagtctgtttatatgtaaaatgatgcttcttttgttgatacttttaatatttgactataagaaaccatctcaatcatatccattgtccagtttctcagatgcgcagttgagaaaccttgctattgctacttcttgttaaaatcaacaattccttctgtagtgaaatggacctgtacctatcagcatgagaagactagaattattcttctgtctaaggatacagcctttgaaaaacttctgagacaaaatatattagccctaaggcaacttccccttcctcttttatccttgaaagctgatggattatggtaagaagtggcccaagggcacagaagcaggcgtgcagttgagtaaggaactcttccataataaaaaggggatgtgcttattatgacataggaactgaacatggaatgtttttccctttgtctctctccagttaaaaagaaagacagcacagtgcccaccacaggcactctgagccccagccccacgcaggggcggtctgcttatttcccactgtcgcctccggtctgtggccgtgcctttcatcacaccacgggcactgattcagccaaggacaagatccgtgctgttaattggtgttcttagcagaggcgttcctttcattccctttgtctccatctccgcgcttgctttgttcctgcctggaataactccagccctccctccctccctcgctcccttcctctatcctcactgtgatcactccgaggcttgacaggcagggaagagttcctcacaggaagacttaacaacaggaaggtgcgggacattcttagaaagccgccttctccccaggcactggcagcactggagagacagcgtttgaaccccatgtgggatacatggagaactccaaaagcagttgctccagccctcttttctttttgtctttggcctttattgttgtggtggttttagtatgtgataacccaaaaaagtgggagacagctctcaataaatgacaaaatggtgatttgaaaaataaaatgcagtgccattcagtgcatgtgggtgggcagggggaagagagggggacaagatgtcataaaatcaaattagttcaggtcttggtgttgcatcccgtaatgctttgtgtgcttgggagtagatggtacctgtggggtgcatgcacctgggggcgctttacctcctccagtctgtgcgacatgtcttcatcctgtttccaagtgcttattagctttagttgagcagcattttccttttgatgggggagttactcaaatataattgtaaaaggaattcctaattggttacagcttttgtttctttgtttttgaattaaccagggactgtataatataatgtactagatatttgctttgtggtttattggggggaaataatcttctggttcctcattctacatagctgtagctctttctaagctaatattccatcccttgaaactctgaaactttagctaacctttgctgtagacagtgtaaagtggctgggcgtggtggctcacacctgtaatcccaatactttgggaggccgaggtgggcagatcacttgaggccaggagttcaagaccaggctggccaacatggtgaaaacctgtctctactaaaatacaaaaatattagtcgggtgtggtggcgggcacctataattccagctgctcgggaggctaaggcaggagaatcacttgaacccaggaggcggaggtcacagtgagccaagatcaagccactgcactccagcctgggtgacacagcgagactgtcccataaataaataaataaagagaaatagtagttggcaggctgattgcagaatactccaaagccacgttttttccccttaatgctgttattaaaattagtatgttgtcatgtggctctgtgaaaacatgtataagttagcatggtttatagtaaattttcttgaatgtaggtaaaagatgtttccatgctagcattctgaatctggtataaattttttaaaataataataaatgtatacatgaatgaagagaaatcattcacctcctgaaataaatcagtcatatagtttaaaccactaattgcacaatttttaaaaccgttttgcctgggagagtctttttgtgccacctgcttcatttaaagacatgtttcaactttttaaaaaatctgcgtatagccccctgcccccaacgtctttggtatcctctttaacaaagcagccaaagtgatttcattttttttcaacaaatcataggaagacattagccaaaaataaatattcattatgaagaatacacttccatatgccttcttcatgtaagattagatctttcatttctaacactctgtgtttaatgtcaagaactattatgcccatgggttcaacattcatgtttcttaactgggtgagcacctctggaaggcagactcagatggacagaagggtgtgtgagcaccgtgggactgcttatttcccccagaattaactttctgtttccttacatgatggttgtctattcaggacaataataagtactttattgccttgggaataacttcccatatagagaaattaagaatcaagaacccattattttataacagggagaacttcggtatccctcagtcagcagtacacaaaataatagtctcatacgcatgctgaatttgttttgttttgttttgtttttaataatctttctttgtatgagtaatacgaatcttgggtaattttgtgaaaagaacagccatttgactttttgggaacacagaggatcagaaacatctgaaaaagccacacaactagaggagcattcagaagttcttgctttctgagcatttaaacagaccagagcccagagtgccgcagcaggctgtcgctccttgcctgcctggggcgggggctgggggaatatggggtcacatgctgcatcctcgccctcagcctccatcagagcgtgggttgtctcacagcaggcctagacgtggccttatgcctgttgttctgtcatgcaggagaggtgcagggaaccggatctcccctgacctctgctgtcagactgaaaagaggaccctggaacagtgccacattggggctcgatgcgggcagtggggccactccctggctggagaactttccccacgagggctgatgcgacatcacctttccaaggtccactacccccagccagtactaaagagccatgtggactgcgcgttaggagcggggcagaaagctgctgggcatggatgtcttcagctggcaggatgtgtgtgtgtctttctggtttcatttatatggaattttttttttttaagtgtctctctttcacccagcaaggctatctgcttttgttcttgtgtaaaagtcaggaatgagtccaagtcccctcccagtaatcactggtaagatagttccttggggattttttccttttgttatagcttagacttttggttacagaaaaagcatactgttcatcttcccaaaaaatatattttaggggctggcttacttaaaaagcagtgaaaatggccctatcatttcaagacagcaatatggcctagacattctcctctagtcaagtcagtatttgtccagagtagagaaagatcacattaaaaagtaagcctcggcctacagagttgggttaaaaaagacttttttacaacctagtgattttttatgacatcgtggtttttaacaatgtgtggccatctgccaggcgagccatcaatctgagtctgcctggttcaccccatctcacctctggaaggaaatgggagatgaggcaggcagaacagactgcttccacggccggtgggatgaaagacgccctctcggccccatctctgctgggaggcagtgtagtgggaagcagagaaagtcccatggaggcggcttccgttagcactggcatgttctgtttggtgacatcgacgcggccagcctcctatctctagggcttctcactctgggtggtgatgaggccattttctttcaagacgtgactcactaagactagcccaacaaccaccacttgattcctatgttggcctcttgttgctcggctgctggtcacaaggcagaacagctataggctcatcttttcctggaagccaacagcctagtgatcaactgtccaccagctgcagaccacgtgtttctaaagcattcctgagcctcaggccagccaggtcctgttccgttcaggacatgtataactccagtctctagccttgttttaattccttacgttgatccacactagcccatttttactgttatccacgatcagtaattggactctttcttcatttattttatttctgaggtgttttacactttcactttggcaatatgtgagatcctgtgcatctgattaaccaagcaaaggatcttaccatctgttttcatttacatttaatttcttcacgtttctttattggaaatttcagtggtgaaaataaaaagaaagacctttaaaatgaaatggtttcctgaccagaaatgctgatagattagcattccccttccaagaatcagcttgagaggaaaaatgatgctcaaagtcttgcatttgtctacatagctacattttccaatgcttatgtaatgttttcagtgttttcagaaacgacgctgagaataagagtgtaagagccagtgtgtacatgtgacttccgttggcttgttctgtttggtgagatcgacgcggccggcctcatatctctaggactcctcactcttgagtggtgatgaggccattctcttttcatgacatgactcatgaagactagcccaaaatggggagactgcagtgtgttctcattttcataattcacaaagaagagcagttgtttttcactgggttggttttaattgatgccagtgattacattgtgttctggcattcagggtcacctggaggtgtctgctggtgaaagctccccactgaatttgtgggaggggctgcgcagggaacggtggaagtgttggcccttctcaggcggcaaagaccatgtgttcttcattacagcatgagccgtggcagtgctgtgttgggcctctggttgaatcttgggattatttaagaaaaaaaaaacctggggaatttaactttctccttcatgttttctgtgttcaattcatatttgaaagcaaagacagagttcatatttttgcatttaggacccactgtgcaatatgtaaaatttgcttttaatagtcttttgccacattttcagtcattaccattctccagactcacgctcagtgcttctctggctgttgtaaagatttcccatgctgacatgacagcataacaaacagttgcagcccagaataaagccctggaacccaggtatgtgcagagaaggagagaacccctggggacgcagtgtccattctaaatctggtgtttcaacccctgatgaatctttcttttccagaggaacaaattaagactcactagtactcacagacagatgatacaccaaacatatgtaagagcaaggtaactggaatgaacacatagaagtcagccaagaaacctctccagatacttgctcacaaatagaatatagatttaagtttggagaaatgttttaaaaatacttgtatattccgaaccaccaaaagggtaactgtattactgggcaagtcagttgcttaagatttcccaagtaataccccagctttgtctcatcatcatcattttaattcaatatgcattgcccaggggatgattataatcactgtgtaagatgcagagaagatgcagtccctggaagttgcatccagaggattaacttacagattaactcagtttttatgtgatctgtaagagaatttctagtgcactgtggtcttttctttattcaaaaaaaaaaaggccaccttgattccaaaagcatggaattcaaatccagtttgaaagtgtagagatgacaatcatttactcagaaattttgctctagaacatttgaaccaacaccgtcaacagtcataagctaagaatttgattattctttttaagtaatttatagatctgattttcacatttgccttacagcctcccttgtatggtggaagaacttcctgaataaaaatgtgatttattgcatcaaattcttgacaagacagaagtttgagaaattgctataggccagttatacctgattacaccgggactgccctcttttcaaatagtctgatggagttattttcagacattagaagcagttgctgcaaagtgcctttgaattagctttcatcagcacatagcaataactgctaagtgaacatttctttaaatccttacaactagaattttaaactagccctttgcttcaagaacttgcctctgagttgtgctgtatcctggttagagtttttatcaagacatcatttcattgttcatttgacagatatttttgaacacctacaatggacagtaagatgggaatatctgtctttaacataagctagctaaaatcctttgggggagacagcgtggagaatttgcaatgcaagacagatgttcaccggaactctcctgctgttgagcagggcatccgtgggtggccctgtctcatcggaaacgccctggctgtcaatcggcagcagacccacatgtgtgcatgtttggctgacgttatgtggcatgagggctgccagtcacagcagaggcttggtgaccttgtggggtttgtgaccctggctgtccaaggaggcccggccttcacagccccagctcttcttcccactctgggcctggggcgcttgtccttagattcgtcgtctcgccgctctgcttcatcctgctttcttcctcagccttctgcagctttttcctacacatcagtgtgagtattccctcatactgtgttaggctataagtttccaaagacttttttcataccttttccccccagcagcctggtaaaggctagaggaatcactgtcattttacacatcaagaaactgaagcaaaaagggggtcattgactcataagaacccacacccagcaggtggcaggggtgttagtggaaccccggcccggtggccttgagtgtccactcatctgtaaagaccacaccaggcaaatacctattgaacacatgcatgtgccaggcagactttaaactccagatatacagcacacacaaggcagcaaaagccacttctcctggtgcttccatgctggtgagactgagaaatggaagacatgcagagatttgggtgaaaccttttcaaattcagaggctgaagtttttagtttggcttactactctgctcagcaatgcagttgttactctagaacactcagaagtctttaagacttttttaccattgtgaaaataaagagagggttaaagtgaaacatgatcctccttggtctgcgaccagcaggatatggtcctttccctcctttttttaaaaaaaactttttttttaaggtttttattaatcacagatgtcccaaatttacagactgggcctagaaaacagcctctcttgtcctggcagtccccgtgttttgtgtgttcacatggtgaaactctctcctgcgtggggctgaatgtcagcacttctgctttctcttctttctttaccttttttttctttttttatttaaaaagaaatctagcatggactttttttgaactcttatttcagcaaggaagccatctatgtaaggatttttccctcctcaaaataagaaggaatgaatttgaattgactttctcttggtgcttcaagcagatcacagatggctttctcatgcgcacagctgaacatctttttaagtgactgcgatgtgctgatagtatcttgtgctcaagtttactttgttctattttaaaaatagaaatagaattgaagtaattcatctagattgcttcattcatccttcatattaaaagtgatttttagtacatcctagacgccatgttaggcctgcagttacaaatctaattgtgatgaaacctaattctcattttctgggtactcacagttgatgtaaatacaatgtagtgagttctgtgctatcatggagtcctttatgcctcagccatcctacatttataaacacttaacagtttatgaagtttgtttgttcccattatttcatttaatcctattacaaccctgtgagatgtggaaactcacatgccagaatgtttgctgtgtagtgggagtgccaggttcactcaggccctttgacaagtccagcattctttctgacatcccttatggatcatccatctgggccttggatcagcgggtttccccaggctggaaagggggaagcacattcccaaaccaggcttagtgggaactgaaggcattcttgctgatgagaaagttagcgatggggtgaaaaagcaggactgagagttagttgacttttttttcttccaaggtgataggagttgagggaaaggcaagagatgagtaactatttctttgcataatagatgcatctttttttttttgagacagggtctcactcacccagactggagtgcggtggcacaattctggctcactgcaacctctgcctcctgggttcaagcgactctcctgcctcagcttcccgagtagctgggactacaggcatgcgacacgatgccaactaatttttgtaattttagtagaaacagggtttcatcatgttggccaggctggtctcgaactcctgacctcaagtgatccacctgcatcagcctcccaaagtgctgggattacaggcgtgagccaccgtgccctgcccagattgatctttcatggtatttctcaggtcagttctgtcctgagcccccaccccgacactgctttacatgacaggcagtgttcacgtacacttagtctggactctgccttctgagacagcaaagcagtaacacaagtgagagatgagtcgctagaagggttgccttatttgctttgaattatcatctttgaataaataattcacaaactcatgaacttgactaaaattagatgttacttgtgttcacttcaaaactgatcaggatataccagtaactcaggacatcaccattcatagtggttgacttatcagtcagtatgcataggctgagaaataatagcttgcagctggtttgttggctcacctgtttgtcatttattcagtgtatactcattaagctccaggtgtatgccacgctgcctgctggcagctgggtatgtagttagaaacaaccagacatggtgccctggagtctaaggtcatggttggcttcctgccttcacagttgcccagctaggaaaatgttgtgtccgaaattgttgggttcttggtctcactgacttcaagaatgaagccgtggatcttcgtggtgttacagtttttaaagatggtgtgtccggaggttgttccttctgatgttcagacgtgtttggagtttcttccttttggtgggttcgtgggctcactggcttcaggagtgaagctgcagaccttcgcggtgagtgttacagcgcttaaggtggcacgtctggagttgtttgtatctcttgtccagagttgttcattcgtcccggtgggttcgtggtctcgctggcctcaggagtgaagctgcagaccttcgcggtgagtgttatagctcataaaggcagtgcggacccaaagagtgagtagcagcaagatttattgcaaagataaagcttccacagtgtggaaggggacccaaatgggttgccgctgctggcttgggcagcctgcttttattcccttatctgaccccacccacatcctgctgattggtccattttgcagagagccgattcgccgattttacagagagctgattggtccattttgacagggtgctgattggtgcgtttacaatccctgagctagacacagagtgctgattggtgtatttacaatcctctagctagacgtaaaagttctccaagtccccactagattaactagacacagagcagcgattggtgcatttacaaaccttaagctagacacagggtgctgattggtgcatttacaaaccttgagctagacacagagtggattggtgtatttacaatcctttagctagacataaaagttctccaaggccccactagattagctagacacagagtgctgattggtgcatttacaaaccttgagctagacacagagtgctgattggtgtatttacaatcctttaactaaacataaatgttctccaactccccaccagattagctagatacagagtgctgattggtgcatccatgaaccctgagctagacacagagtgctgattggtacatttacaatcctccagctagacataaaagttctccaagtccccacccgactcaggagcccagctggctttgcctagtggatcctgcaccagggccacaggcggagctgcccgccagtcccgcactgcacacctgcactcctcagcccttgggcagtcgatgggaccgggcgctgcggaggctcaggctgcgtgggagcccaccgcagtggggcttgggcatggtgggctgcaggtcccaagccctgccccgcggggaggtggctgaggcctggcgagaattcaagcgcggtgcgggcgggctggctggcagtgctgggggacccggcacaccctctgcagctgctggcccaggtgctaagcccctcgctgcctggggccagtggcgctggctggccactcggagtgcagggcccgctgagcacacgcccacctggaactcttgcaggcgctagcctgcgagcaccgcacacagccccagttcccgcctgcacctctcccaccacacctctgtgcaagcagagggagccctccagcctcagccagctcagagaggggctcccacagtgcagcggtgggctgaagggctcctcaagcgtggccagagcagaagtggaggtggtgctgagaacgagtgagggccgccagcatgttgtcacctctcaatgtgatcatgagccgattacacagggctctgaccacagggctcgccttcagagggctgctcttgttatgggtttgagccatccacaatcaaatcctgagcaaaaaagtaaggacacagtgccaaaaggacaggagcatgcctgcacagtgtgggtgtctgggcagggggtctcatgctcctgtgttcacagccatcaggacctcttctggggaaaggcaactgtgtgcacaaaagtaatttaagatcttcccatggagacttcagaattctagagctctgtgtttatggtgtgatatatccttatcctgtgcccagtaactctggagaccttaattctactcaagataccattaggacatgggatttaatttaaaattcgcatcaaagtagctgatttagtgggcaaagtctatatttttcagatagctaaaaataatagatatgttatttcattctgttaatgatggtattaagtttaaagacttttaaagctttttaaactcctaatgtgtacattgtatcacaacccagcaaagagcatagacatgggctgttacattccattgatttaggccaaaggaatttctactgtgaaaagaaaaaaagttttttccccaccagagagagtcaaatagcatgaagaattgagcattcttgttaaagagaaggggtcattattgtccctctacatttgcagacttctgaaacaaaatttttctcaaggtaaaattttttaaattccacaaaatttttcttatagtttatgaccactgctaacatttttctaagtcataaatattccggcaaaatgaaagaatgtcacttccgtcattcaataagtaggaactcagggcaagaactgctgcttctcatcaatggcagttgtcacccagtcctttgcatttaatctgtggcaccgatgagctcccaccttgggcagccctgacctccccccccccccccgccccgccccccggtactaggagtgaccatttaggccatagccacatttttaatgcttaacctgccaggtaagcaggaaatctctttcgaaccagcttcccaaagtgcaaagaaccaaatcccttgcagctgagcccacagagagaagctggggaatgacgtatttaatttccttttcttcttgaaccatttttacaacaactagctcctttcccaggcaaggctaagtgtcctgggaatcatccttgtaacgccagctgggtgccacaaagcattattaattgactgtggttccttctctcatgcgtgcagaggccgctggatctgctgaacagtagggaggtctgtgtgcttcagggctgccctgcgtccctgcctgccctgcatgcccttttccgagagcacgcctgcttctctgtagccctgcaagtctgggtggacagagggaccaggtcagaatacttggtaggtgtcacttaggcttcataccactcctatgccaactccccccaagttctaacttacaggcccaaaaatgtctgtgaggttgatttattggctgaggtcctactagttgtgatgtgtaagtgttctgcttatgaatgttaagacctgtacttgatttcattttactaaaataagtgggcctgggtcttttttttttttttttcctccatcagtttatccaaggcacagcagagctccgtggtgacacctcaccacatctcaggcatccgggctgtctcccgacctccccacgggccacactcatagttccttgtcttgtgcagttgtgaatctatgtcaaacaaaagactgtccttaaaatatgagctgtgggtcagcttgctgtttctttagactgttgatttctgatgtttccatgtaatacttgtgtgcctactgtatgccaggcactgtgcagagccctggaagtacctcaggtcccagacagatgaggcccctgccttcctggagcttttatccattctcctgacccagtgcctaggttacctgtgcccacctccctcaaaggccagcttcagtgccatctccttcagggacccttccatggttcctcctcctgttgccccttctcaaccctaacagggtttgtacctcgcctatagtacaggataattttgtgatccaaataccactgtgtgctgagtcacatggatgaagaaactaggtgttcattatctctgtccagtgggaaatcgggggcttggctccaagtcacagcacagtaagtgactctgaaatctgccacctgctccacctgctgtgagcagtgcagggttctgctagcagttggtactttaaaaaatattcgttgaataaattgtcatctgacatatagattatccaaacctgccccttctctttgtccttcctgaggctaggaactgtgtctacctcatttgcattttatcttaaatcagcacctgagaaagtccctgggaatggatttcattcttttcctacctccttccagaccacaccgaaggaaagtgagactgatagggaaatgttttagtaactcttgtttaaaaatagagtaaatatatgagaaaatatatatacatataagtacacaaacataatatagacacacatacagaggggaaagggttatcattctttaacagatatcaatgggttctgaaccagagtttgcctctgagaaaaatctggattttgaagaatgaatgatcctgcctaaaacgcatcatctgtttctggaatcttcactaatctgtgtcttgggcgaaggaaggaacgggacagcagtgagacgggcgtgtgctgtctagtcccagcgtcggaagcacttggtgggaaaccgctgccaactctgctcctgtaatcacagggttcacctgcagcagggaatggcgtccagagccagagaggcagtgcagcccctacaggtatctgtgcaaaggagtagctcacaagattacttgacttgagaagatagcaagcacagtgaatgatcaccattgtcaccgttctgctttctaaagttggtcacttcattccatgccaccgtggtggagcccctgagccaagagctcaggaaggggcccagcagctttcacgctcactggtgtgcgagttgtacagtagacgtcacacaagtccatggattggctgagtgtctgctgtcacccaaatttcagatttttgaatacaaaaattagctgggtatggtggcagtcgtctgtagttccagctacttgggaggctgagacgggagactcttgaacccgggaggcagagattgcagtgagctgagattgtgccacagcactccagcctgggtgacagagcaagactccatctgaaaaacaaaacaaagaaaaattggattttttttcttttttctcttgaaatgtcatccactccagattgactatatttaatttttgagatccaatgagaagctggtttggatatattttctgtagagcattttggttatttgaggaaggcttcccctcctcacatttcttttcttttttttcttttttctttttttggggatgcagtttcgctctgtcgttccggctggagtgcgatggcgtgatcttggcccaccgcaagctccgcctcctgggttcacaccattctcctgcctcagcctcctgagtagctgggactacaggcgcccaccaccacacccggctaatttttttgtatttttagtagagatggggtttcaccatgttagccaggatagtctcgatctcctgacctcgtgatccacctgcctcggcctcccaaagtgctgggattacaggcgtgagccaccgcgcccggcccctcacatttctttttaaaatgtggtggcgtttttgttcattgttgctgatatttacttcagcacatgtggtaagtttctcaagactgtgagcaaagtcccggtgtgccgccgtggcctggccgtgaacaggaaagaggctgagggccgctcctccgagagccccaccagctctgccactttccagtcgccggctttgtcctggatgctggtctcccagaggctgctgctggtcagagtctcaccaggacaaatcactgtcattttatccgtaataattacacaattctgcttttgttcactggtagagaatcaaactaatgcacttctgcgacaggattagcttacagtaagcatgtcagttggcatagctaaaacttctcaaaatttcctttaaattcattcttctttcttggtttttgtcaagaaaatgggtgaaaatgattttaaaattctgtcctccaatgtccgcagtaccaatgtccacagtattttatgtgatgaatgacatcttaaatctggctgataacgatgctggtcttcaggattggtgacatgggtgattttggagaggacagtgcatcttgagaatgatcatctctagcagaactcaggtttgctacacatttgagaagagagtgcgtgtaaagcatcagcccctgtcatctcacaccccgtaggcaaagcccgctgacgaggcatccaggcccactggcttccctgcagcctgcgggataatggcatggtcttcacaccggagggtctgtgcgagtcagtgatactccctctctttctccctggcagactcgctctccgtctccagcaatgacgccagtccacccgcatccgtggcttccctccagccccacatgatcggggcccagagctcgccgggccccaagcggccgggcaacaccctgcgcaagtggctcaccagccccgtgcggcggctcagcagcggcaaggccgacgggcacgtgaagaagctggcgcacaagcacaagaagagccgcgaggtccgcaagagcgccgacgccggctcgcagaaggactccgacgacagtgcggccaccccgcaggacgagacggtcgaggaggtgaggctctgcccgctggttggggccggcgtggcggggcccgctgggcttttgctgcaagaatagttgctgatcttatgagtaaactggtttggttctgttttccgcacttactcagaaattaccattcaagtctctgcttagcagactgagatttagtggggacacttgaaagaaaattgaacccagtaagcacattcaggaccacgtgtggcttctgattaaaaacaaacaaacaaacaaaacagatcaccatgcgccccaggcccagtcagcccccaggcctgggccaggagggagaccagacttggcttctggaccctctcctccccactccaccatgaagcaaagccagaggctctgtgtagtctgcagaagatttgggcagtctctgagctgatcattgtggcagcattttgcagagaaagctcaaattggaaatttggaaggacttgtggagtgtttgcactttccaattgtttttccccaatatttattatacttacagcttgtcttgagtagaaaataaccagttaatttactttgttgacccagtagtaaacattgggttattcccatgtcaccaaaggtaagtgcatgtaggtcagccagagattttttatgtcctattgacaagggaggctttaaattacattgcaagaaacagaattccttcaggatgctggagatggccttcagcactggtggtgtcaatgaggggtcctcagagtttttaattaacttggatcgacccccgactcaagtctcacacaggttcgaaaaagaaaaggcagagagtggggatgagatttgtgttatttgatttatttggcagatagctgttttctgctgtttttttcctgggcatatttttgccatgagattttgttgcagtgtgggggttgggatgtattatgtacattcttgataaacctctgtcctcttaggaaaactaaaactgaaatttgtttctaaaagtgagaatagaggaaaagaatactcaaatccagtgcttaaaatgcatcttggattatattttttatgcccttattatttcagtgaacttttctatagcaagatacccaaagtgaaatcagctggaccaaaggaactaaatcaacatgagggttgtagctcaaatttttgagcctttttaaaaattggcttctcaaagatgagctgtgttcagagcctaacagatcacattggcagtccctttatatgacacatgacacattcagtggccattctgtcatccaagttgacaagcaaagctattgggtagcaggaagagaggaaaagttaccatcgaggtcgagaatagctttgttcctgatttctgccatcccagtctctgtccccaccttgcttctccaagtaacccttggtccacgtctgtgaactggcctggaatataatgagcaaatcttgactggatttcagagaggccggaacgagggcctgagcagcggtactctctccaaatcctcctcctcggggatgcagagctgtggagaagaggaaggcgaggagggggccgacgccgtgcccctgccgccacccatggccatccagcagcacagcctcctccagccagactcacaggatgacaaggtaaagggggatgagggctggggaatccatgcctgccgtgcaggggcagggcacgctcggtagctgcttcacaccagcctcatttcaggagacaggaggccccaagatgtggaaaagggcaatgcagtgctctttcaggcagcgtcagcctggttgtaccccaaaagtatgagtaacaaagccatttagaatagcagtaggccagcgggtgcagtttttcttacacatgtggctcaatgcatttttaatgatgcttcagtaattgccacttctaaagtaattttaaagtttcctaatgtattgactagaatccctgagagaacaatcagagatatcccatgcaggtctgtctgaaggcatcactaaatgaagagttggccatctcccctctgtgaggtttttgcatgcaggtttctggtttgagatgaggttacatcactgtccagttactttttccaacatgccagacattagtttgtaggatccctacgctagagtgcaggcatagttgtcaaagtgtaggaatcagttgaaagctctttgggtctacgcaggagcttcaagccatgaaagtcatttgttttcttgagttcttacgtagtctaaaattattttgtcagcccaattgtagagccctaaaaaataaaatagcagaaaggaaacctgctcagtgtggcttgcacatcctctagcattctggccctattgtgcccctcaaaatcatgctatgaagtcattactggtgatgctttttttttttttttggcagtaactaaattttctgagtaaaacagataactttatcaacatcttcccccatgcttccctttttccttccctgacttccttgtcagtacttgcacagtcacttgccagattaatcaccctctattttacgacatgggattggcctcagccggtgcttagcagctgtgaggccaagtcaaatcatgcactcctcttaacccaaggcagacctgtccaccaccccttgttggtggaaagctactccctcctccctttttaacacgagaccagcacactgtaagggtgctgtggggcctgcaatgatggctgtgagctgcaggactgagcacaggttggagtcctggagttttgtgtgcatctgaggttcaggctccccaccatgtgtaggggagaaggaacagggagcctgaggtgagaggaccacagccccctaccccacccagtacacaggctacctggctaggacatggggctgtgtgatttctgtgatatttcctaagctattttgtaatacgctaagccatgcctttttgaaaagcagaaaactggcatttcttaaatctgggtggttgtccaaacattgaggggctgggccttgttgacttactcacccataagggaggatttttctccatttaaagagtgacctgcactgtatccttctgtttgctagttactatgttacctcgttgagtattatcagtagcagttcttcatttacaaaaatctgtagtgattttcccacacagtatataatctcgtgactaattttttgttttgttctgttttctctttttgtaaactttcactgcagcattatgttgatttgtgttctgtgtctgttttggctcaatttccttacctttccgtttgaatttttttctttgttttcttcaccccatattccaaatgtcattagaccaaaccaacatttgttttgcaaagtgcatattttgacccacacgtgtaaaagccttgttgtgagtgtatgagcctgtatctgtctgctgtgagacacgcatggccaggacagcccgctgtgggtcgcatgcctcgccgctgtccttaatatgaagcaaggttcatattacgccccttctagttcccagttaattaacggctcaagtaatctgcaaacacgtcgtgtttgctaattactgaaactcgaacttagtagcccctcccccagatttcctgtcaacccctttacgccctcgattctagccataagtggcatctgatagcttgtgaggcctcagctcttctgtactctgcactaatcatggggaaatggatggcacagaaaatggtgagcttgtccccctccttccctgtctggtcaccgcaccccgttcctttcctcttcctcgtttcttttttttcttaatcccataaacacagtaaagccatttcttagtacctgttttgtttcctgattattccaggattctctcactagaccctaagcctctcattctgctgtaggtcagattctctattccttctccctagcccagagccttgccagcacttgcgaaagttacggttagaacgttcccttgcctagtcacctctttgaaaaaaacactgtgatgttacatgactgcgattcaaatcagacactgtctgcttcccacatgtatctcagacaggttttatttaatgtttcttgtcagaatattgtaaattcaaaaggatgactttaaataaatgtaaacaaagacaaacttgtggtctttttgtctggaattactttcacaagagatggagcttgcaggggaatttactgtctgaccagttactaatgtgagcccttgccccaccccctccttttcttaatttcttctgtaggcctcttctcggttattagtccgccccaccagctccgaaacaccgagtgcagccgagctcgtcagtgcaattgaggaactcgtgaaaagcaagatggtgaggcctcccagagaaagtctgacttttggaagctgctctgtgttgctacttgcagatggatttgcccttgtctttgtattgctctgggctgcagaatgtggctgtggcttatggcacatctcaggagtccccatgaccaccctcgggttcactgatttgaaggactcagagaactcaggaaagccattattcccacatttgcagtgtattcccatgaaaggacacagatcaaaataggcaagggaagaactgcatagggcaggtctcagggagtgcctggttcaagctgccagccatgctctcccagtggagtcaggcagacagaggattgccaaccacagcagctcacccgagccttggtgttgagtgtctgtttgggctcagacgcatatggctgactgctctgtgtggctgaccttaggtagtctcctgcccctccagagatcaagacactgtcacattgctagcatagactatttgccttggtcccaggcccccaggtaaacagacattctcatcaagcagaacattccaaggacttacaagttccctcctagaagctgggggcaaacctcactgcacataccctgcctgcagtcactgcaaatgtggtcagctccagtctgtctgaagatgtgccagggtcagtggtacccacagttagactctccgttttgttttgcaacccctgagatctttcatttgggttcacaatgtgtgagagagaagggtttacattattatataagggcttcattttcttagtgatctctttgttgccagttggccaacgtgggttcatttgataaaagccccaaattaaatgttggttctttgaagttaagacaggcatgtgttgcttctaactgattcaaatcaattaatttctgtttttgtagttttcctaactgggaagtggaaaaaccaccaatggtaacaactttttagactggtatatcctactatccctataaagacaacgtcttttaaaagcagctcctcccaaagtaaaagccctcagtctgtctcagcaatccattctccagaggtaaccactgcgaatagttctgatacgtttccctccagacgttttccttgctggtgcaaacatatatatgtgtgtgcgttttctttccaaatggattcattcaatttttaagactctaataattaacacatcttaaggatcttctcacgtcagtacatacagattacctctttcctttatttaataactgtatagtattcctctacatggattctgtgataataataccactgagcacttattctaagccaggcgctgttctaagtgctgagcatgtattaatttatatacttcccacaacaaccctatgaggttgttatgcactattgttatcccattttacagataaggaaattgaggcacacagaacatttaaaaacttgactagccactaagggtcagagacaagattatgctataatttatttaaatatattcctaatacatacttgtttcccatatttctctgaacatccattacatgtttgtgattatatttgtcaggtgaattttcaacactggaattgctaaatcagagtatacttctttaaagttagaagtttctcttcctgcatttgggcattaactaggtaccagatatatcattcccatttcttccttcatccacagacaacctctaatgaaactggttgactgagtcaaatgggaattatataaagaaaaatttggactgacgtgtcaccctgccatagctagaaatttctccccaggtaatcgtgtggtgttccggagaagacccagtgaactttgaacaggaagcttgctagggtgtggtagataactcacgaattcggactccactggttaagattttggaatcaggcctggtgtggtggttcatgcctgtaatcctagcactttaggaggccaaggcaggcatattgcttgagcccaggagttcgagaccagcctgggaaacacgagaccgcatctctacaaaaaaatacaaaaatcagctgggtgtggtagcatgcaccggtagtcccagctatcgggaggctgaggtgggaggatcacctgagcccaggaggttgaggctgcagtgagctgagattgtaccactgcactcagcctgagtgacagagtgagaccctatatcaaaaaaataaaaaaaggagcttggaaccatgccagtatgtactgagttcagctacatccttggtatctctttaaaagacaagttgataaaactgtctaaatgaagggtgcttaaattgtatccagtgagtttttaagcatccttaaacttttttttaaaagccatttatacacgtcagttaaatgaccattaaaatcattcttaccaaatagccgaaatggtttcccagggaacgctgtgaggcagatctggccactattctgcagctgtttaaattgtattgcattttatgtggtctgtgattcatttgtaattaattcacgtggacttccaaatggagaggtggtctgtggcatggtcagttttgactcttactgtgttaatctcctttttcaattctgaagaattaaactttctcggtttactcagtgaaactgagttgtttctgctcacttcagtgggcataaagctgttggcataggaaaggcataggttttggagtcagatagacttgggttcacagtctcattacggtgagttccaccaggcaagtccttcagcctcggagactgtctttcagctacacatgggagctctcaaccaggtttcatccacatgggtgttcactggtgccttcccctcccttgggagaaccatgtttgtactttatgtgataggttcatcccttcttcattctgccagggaatgcgatctaaattctcccctctttttctggttcaagagaagcatcaccctgtgttggtttcctgtcactaatgctctaacgtcacatgggaactagtttttgtcagaaaacactaatgcatcattgtaatatcctaaacttatactgactctgcagtagatccttaagcatccacatgtgttttcttgtgggtgatttctgaggctgtcgcacactcataattggatttgaacactgcattgtttattcttcagaaactctgtatgtgtttattgggttagggaggagaggagagaagatgttcagcagttacacagtatgatgtttaaggaactgaacctacctaaacctaaaacctgaggatttgactcgaaaaatgaaagcccccctgaaaactgttccctggattcattcgtctggcttacctccacgttcttgatgcagctggttattttaaaggctgtgcatttttcctgcatgtcggcaatagagtaatagttccctgccgccacagtgattgtgtgaacttgactttggggttttcttctcttcactaatcaaaatataaagggagaaacaagaaagaatgaaaataaatgaaatcacatctaactcaagatgttagaaaaacaacaaaataaaccaaagaaaagcagaaggaatgaatttatacagataaaagcagaaattaatgagctggaaaacggtagcataataaaaccaaaaatttattctttaaatataggcattaggtaaccatgtcaagaaaacagaaaacacaaattcccaaaattaagaaattataagagaggaaaaaactgaggaaattcaagcaatcataagacattattttgttcatctctttgatagtaaatttaaaatgaaacctgaatgaaatgggcagttttctaagaaaatgtaatttatcaaaattaatctcataagaggtagaatatttctgtagacctatcttcatgtaagaaagagaggagaaggacacaaaaaacaaccaaacccagagagtttcacaaataattcatccaaaatctgtgaagtcccagtggctgcagttttgagacagccttaggctggtgacagccttctcacacacatttgtggaagaggcaaatgggccacatgaaggcgataaggacgtctagccacaactgcaccgcttcagggtgtgtgcaccctctcggcagcccatcttgtcaggaaagatcagatctaggacaggcagccgaggggcctggggactccattgttgcaggtcgagaaagctggaagacaggtccccatggacactgatgaagtccgtgactttacctccctgccgtctgcagcatcaggggcatctggagcctttctctttcttttctttgttttttctcactgttcaaatgaacagaattcaatctaacaggcttcagctgtccaggtgggggatggggggtacagaacatcctcccttcgctctcaaaaacagatgtgatctgatgagcgtgaaacaagctctgctactcacagcaaaatgtttgcttccagtaaagctcaatggctatttatttaaaagagtgcatttatttttcagatcaaactctgttccttaactaacttaatgtcctgtttttcaaaaataagatcagcagttggtgtgttttttatagctccatgggttttaacaagattgcttgtacagtacatgctttgtgtcctcaaagctctgcttaacaatgaaatcagattcagtctgttactgttaagaggagaaaatagaacaagtgttagagattttagtttattaataccaaatgttttaagtgaggtattgtttttgcattttgtattgtgctgttcaaacctagaataaattcatcacatttttttccagttcaatcatatctatatatccagtttgttgctttgggaatgttaaaagaactataaatcttatgtgttctgtgaatccaggtaaaacaacgagattaatatttaccaaattgaaagcaatcagtcaccagtcattgtcacattaatccaaggagagaagtcaccaatattcaacttacagatttgctgaacacttgcaaagatttgcatgaggttctactggggatacagcaatgaaaacaatcacctatagaaaccaaaagccagtgggggaaagaatgtattgcagaagtaattaagacaagcacgattactattttgtatagagggatagaatggaagttgctagatggagattaattttaccagagtgatttgtatgcattgaagtatgagtcaaagctctagtaggataatcaggaaacaaaccaagtttgttggattgctgatgttgctacatagtccaccaacagggaatgcaggtaccatgtccaggtgccacactggcctgacccacgcacatcccagcagctcatttggcaggaatataaccagtaagaaaattgctagatattaaatatgtgtgatatgtccaaaaatgggtgcagtactctgacataagcaagtataacatttctacttgtttgataacaagaaatagaatatattaatgtatgtaaattcactatccttttcattccaacttttttctccacctcctttgactctatttttttattaatagttgggttttttgtgttattaaatgctataatttcacaaacaaagattttataatttcacaaatacattttctgtattttctgactttgggtattttcttgtcttagttttagccaatcatgggctgtgggcagtaagtgttgttgattatgtcaatttcttccaggcactggaggatcgccccagctcactccttgttgaccagggagatagtagcagcccttccttcaacccttcggataattcccttctctcttcctcctcgcccattgatgagatggaagaaaggaaatccagctctttaaagagaagacagtaagacagaaatgttttcattcttattgttctctgggttccgtcctgtctttgttgccttcaaaaatgtgactgagattcagctctgaattaccgagatgagaagctccagggcctctcattaagtaactgcacgtatgtaaaagactcaggacctaataagggcacagtattccatagctgcagtttcttgttttatttgtatatgatacttcataagtaagaatgatgcaagacaaaaatgtcttctgccacatgtggtgagaaactcctagactttttattgtacatgtgattgtgaaagaaaaagtaatataaaattagaaccagtccccaaaacttgaatattctttgaacatactttactggtttctcaatgccagtaaagcagcatatggtgaaaagagtcctgaaaaatgttacaaaaggtttaaacttgcctttggagaaggaaaaaaaaaaaacgtaagctacgaaacggcagagactgggtgttttattcagcactgtatcccagcacctccgatggtgttgggcacatgagaggtgccaggttgatgttggttgaatgaatgactgaacaacacatggatgaaccttttcaggccaattgaggttgtttgctatactgatcaaatggttgtcttctgttatctgagtggccttaaacggttactgaatgtaacaaacagaaatacttgtgagtgatgtgattagacacaaggtttaaacatctgatttaaaagtttttcttgtatagccagtgaaggttaaaatgacttaatcattttttaaaagccacttcctttactatcatggctttgtcagaaagttatgtctaagcttcattgttgtccctgtatgtgatcagaatccagaagggtgaattcaccctgattgccctcatgcactgtgcctaggtgtcttttgacctccagagctctcgtgggtcacccacttgaacctgtaagtgatttgggactctccagaatttaacacctaaatgtacaaatttgatacattactattcagtcctggaaggagtccatcttgaccaggagcaaaggtacaaaaaaattcatttagaaaacagtttgcatgataaacaatattttttctctccagctacgttttgcaagaactagtggagacagagcgtgactatgtgcgggaccttggctatgtggttgaggtgtgtattgccagaaatttagtatcttcgtatcagttccaagagttgtcaaaagtagtatcgttttagacagttgaacacctctcaaaagctttaaaaacatttttgacccaaaataaaaagtgaccaacgatgtatttccgaaaaattaagtttagccaattgtctttaccatctgtattcagttgtaaatgcttctttttcgcatagtgtatcttgacataatcttttttaacagttgaaatttacaattattataaataatttgatattattattaaatgatactaagtaagtatactgtagttagtagacaggaatcttgccttaattgtatcactacagaaatgaagaccttactggttgaaaaagtcagtgtggcccagctgtgggttcggttccatcctgaatccacccaggttcagagcctgtactgtggctgcaccaggtcatttacttgatagttttgtacagaacacattgccatttccattgaccagaagttgccaagcactgtagccatagcaaaccactgccttttgtactggatcgagagccatctctaggctaatccctgccagtcaattcggggattagtgagattaagaaactcaactcatcaaaaagctatttttgtggtataaaattttatgtgtattctttcatctttgcagatttgtacaggacaatactttttggttacacatcccattaaaagtaccagctattaaagtcaattgcataacacaaaagatttaacatgcttgatttatctgcagtcattgttcacaatgagataagcaacctgagtacttaagaggttcttgtacagacttaaatagaaattttaagccacattttagcagcatattcaatcaactgttgtttaaaaatcagtttataaaaagaatattgttaaacccttatttaaccgattacacaaataatccaaaaagaaaagaaaatctttctgtttctaagagataaatgctgaaaacaggagatatgattctgaccaaatatttaatatttacaaactgtttaatgaaaccatttacatttatttaaacttctttaattccttagaagatttttgatctgtgaatgctgaacagtccagggaaataaaattacagcaatgaatgtaataggtatattccaagtatcagttaaggatacttttcatatcggttttttttgtttgtttttagacaaagaactggttacaagacagtgcatgtgtccattttgccctctgtgactattaatcaataagccactagttgattcagacatattccatgaaatacacttatcataactgtttaattgtagggctacatggcacttatgaaagaagatggtgttcctgatgacatgaaaggaaaagacaaaattgtgttcggcaacatccatcagatttacgactggcacagagagtacgtaaacatgcattgtgcccgatggtgtgcaaagcagccacacttgctaaaccaaggcaggccaggccaaagggaatttattctgttcatcgtattacctgtgtagcctcctggagggagctggtgcaaaggagatattgatgtacccaggagttctgcagtagcatttggtggcacggagagagtcttgtctcttcttcgtgctggtccatgtcgagagtctgtggaagggagtagctggaagcaccagcgtggagccagctgccggagctgctggcctggtcctgaccccgagccctcggcctccctgctgtacacttccattcttcatctgcacacccacattataatgtgggttttttgtgaagagtgactgagttaatacttttacctcgtgggttttttgtgaagagtgactgagttaatacttttacagagtacttagaacaacatctgcatagaataagcttcaagtatttctaactagaattgcagccatctttagaataaatacaagttatcattagaggaccttgaagacactcatttgtccaattattttatgttatttttattttttagagacagggtcttgctctgtcaccaaactggagtgtaatagtgcgatcatagctcactgcagccttgaactcctgggttcaagtaatcctcccgcctcagcatctctcagcatctctagtagctgggcctacaggcacgcagcaccatgtgcagctaacttttttggttttcgtagacaaacacgggcttgctgtgttgcctaagctggtcttgaactcctgggctcaagcagtcttcccacctcagcctcccaaagtgctgggattacaggcatgagccaccacgcctggcccaattcaattttaatggaaaaagtagacacgattgcccatgaaattcaactctgatcccactacattccccacacctatcctaatcaggaggcaatccatctgggggctggtgctacgtagctcaccttggctaccagagcttgtcaacatacctgtccctttagatcactttgcttaaactttaaaaatccttaatcatctgaggattgcttaatgctggccactggtcttccagtggaatgttccagatgcactgtctgctccggttacctggccgggccttctgctctcctgtcttgatgcaactgctcctccctctgctcagggtggagcacgatgtcatcacctccaaagctctggcctctctctgaagctgagctccatacttgcttctccattaggcctgggtgttccccatcagactccttctcttctgcagaagcagatgggaatatgctcttttaaactatgagatactggacagacatgaggaggaactaccgtgtcacgtatcaagtagtgttgttatttctgtgcttctccctcctaacagaatgtaaaacctttgaacccaggtcagagaggtctttattttcatatcccctgtgatgtctaatttatttggatttacagataaatgatcggtaaactttagaaacagcactccagtttatagctctgtgctgtagacttactgaacaactacagtgaaaccaattcaaaaagggatattttgtattatgatttagtctcctacttccaaggctagtttttaaggctgtgaagggaagctgaaaatgacacagtgtttctgggatgaccagacagacactgtatccagagatgctgtctgcgcagcggggatagtaaaccccttagtacaacattaattggcatggtggtttatgagttaatgtaataccaaatattaacataaataaaaatatatttaagtgataactaagctggacatatatcttaaaagacaactacagcccagaaaacaatgaacattgttgtcctacagctattttgtcactgtgatgatacctaattttaatcttaaagggagctgatgtttataacctagaagttgattttgataacatttgagaaaacttcataaagctggcacaggtaacatatttagttttgtatatctgctgtccaatttgagtctctaaaaattatcttagaatgaatatgaaattcgcaggtataaagaccaagttttcagaaataaaaaatgtccaagtactttgaaacatctatttttcactcattattcagcctaggatattagcacttgtgtccttgaacagagatgagaatgtttgttatccaaagaccaggaaggtcaccagccaagggatatacagtcgtgcctcatcttctgtgcctttgtattcctttatgctttgtagcttaacaaaaggttttccttgtacttgttaagtttccatatatttgttaaatatatacttcacacttcacagttgctcatgtcagaacagactattgaaaatgtaaacctggccaggcacggtggctcacgcctgtaatcccagcacattgggaggctgaggcaggcggatcacttgaggtcaggagtttgagaccagcctggccaacatggtgaaaccttgtatctgctaaaaatgccaaaaaattagctaggcatagtggtgcacgcctataaccccagctacttgggaggctgaggcaggagaattgcttgaacccaggaggcggaggttgcagtgaaccaagatcacaccactgcactccagcctaggtgatagagtgacactctctcaaaaaaaaaaaagaaaaaaagaaaaagaaaaaatgtaaacctaaatctaaaattagaaggccacactggaaatagttctaatattttctcctttctttccagcttttttttaggagagttagagaagtgccttgaagatccagaaaaactaggatccctttttgttaaacacgtaagcacaatagcattgcttatatcctgttctgatggtgtcatccttagtcactggtttgtcagattaaaggagaactcacttatactttatgtaagtgcgtatgtttaagataaaatcaaactgcatggtgttaatgagttggaattaaaatcccttcttcaacatgagttacctgctttcccagtcacctggctgaagctggctatttggctagcaacagtacaggttggtgagagaagaccagagccaggcctgaacagtatctggggtgtctgtgaacaggcaggtattgttgagtggagatgtaactgtacctgcagtgggtttaacataacagccaaatagtgtggatatcgaaaataagcgtattaacattaaagttttttgttttttgggaaaaatcatgatatatttttagaagttagtgacaggagtttttgcatttttgccagtctctttaatgtcttgctaagtaaaagacagctggatttttatatctgcttctgcatccaactcattgctgtgttttttggttcaagtatccaaacaaatccatcttcacacacatatagttagaaaaggatgagtattttaatagccttttcagataattacatagttttcttagacactataccaaaaacttgacagctgatcatttcttaaaggttagttgcaatacggaatctgaaaacctacccatgaacttctcccttgctgtgacattaaatacattgaactattgggcttcgaggctcctgcagccatgcgcggtcctgtgacatcaggcatcagtccactggaagataccaggtcacagacttaggcagatcttccagaggttgacacgtttcattacacagtatccaaaaatccagtttttgaacttgaccacccatctctttgaagtctttaagtgttgtgaagttcagagtggcagatacatatttccaaaattttaattttttgcttgaaagctgtaattttcactaacaaacactgccagttgtttgccttgaaatgacaggcttattttgttcatgttcaagaaaatgtctagcagatacccaagagtaaataattatagtttgtgtcaatcattcttccaagtaaaaatggtggtccataaaaaaaagtggttagttccactcacaactcggttacataagtgctttttcttgagacatttatcaagtgcaattaaagtgttatgtggacatcatcttgtcacaagaatgttaaaaacgtgtatactccctggttgagttttaataaaaagaataatgtttactcatccaggacattcttaagtgaaaccagttttgttttgttttttactataaatttgtggcagtgaagagtttttgccaaggtgccagcaatttcacccaccattggttttgcacatcagcacagatgtcagcacaacaaaaaggacaactgacatcttagtggtatttagaaaatagttgtgaccaaatggagccactgaaaggactcagggggccctgggggtctgcacactgtactttgaggatcactgatttatggaaaggctcattgtctacattttttttcttctgcctttaggatttgagattaaagagcttcttctctactaaaaccaaccaggcttactaggactgttggcagggtttggagtgatggcagtaattctttgtttaatattaagaagggtgttgcggccaggtgtggtggctcatgcctgtaatcccaacactttgggcagccaaggcaggagggttgctgaggctagttttgagaccaggctgggtgaaaaagcaggactccatccctacaaaaaaaaaaaaaaaaaaattaaaaattagccgggcatggtgatgcacatctgtaatcctagctactcagaggctgaggtaggaggatcgcttgagcccggaagtttaaggcttccgtgagccatgatcacaccactgccctcctgcctgggcaacagagtgagaccttatctctttaaaaaacaacaacaaaaaaatgttcttttgctacctatggtgtttgttggtatttggtactgtaaagtgaagggtttggtgtgtatggagagtgatgggggaaggactggttttggagccacaccgtagaatgctgatctacatcctgaatctggaatttactcccgagagccttagctgtgcagcttggttttaagatgagtgcctttatgaatgtgctgaaatgtgcgggtactcgtgtattctaatcgaatttcccattgttataacccaactgtttgccttttttattcctaggagagaaggttgcacatgtacatagcttattgtcaaaataaaccaaagtctgagcacattgtctcagaatacattgataccttttttgaggtaagacctaagatacaaacagaaagtatttctgaatcttttgttccaacttatttctaaaaatgaaagtatcattggtttcccaggagactaatttccaaagaaaattagcctgagtgataagacttctgaacctttctttctttcctgtaaatcagagaaatgagtatgaatttagtctgtggtcatacccctggcattcagaagactgcagtcattgttaaaaataagagtttttaataagtgttacacttaagtctcattacaaagtcagaataattattatctaaacttatagcctaaaaataatatatatatttatatgaataaaataatgcaattgaaaaaatgcctttaaacaagcataaaagactgctttgaaaaacaactcaggtgaaagtgtaaaacttggaaattctgtgaactagcaaagctctagttagtctagtgctttttttcctcgttacttttactgccagtgttgtagtctttctgacaattacaaagactaaaaaattgccctttaatgaacagcccatacgatcttttctctctcttaaaactgtaggacttaaagcagcgtcttggccacaggttacagctcacagatctgttgatcaaaccagtgcagagaatcatgaagtatcagctgttactgaaggtgaggaggtggcgggacaaactctggtgtcaggagtgagtttgctgagaaaataagactcagttggggaaagaaggatttggtaggacaggggaatcatctgtgtaacaggtatattatttctgataagttaaaccttaaaaatttaaatcagctgttaactgaaggtgaggtggcgggacagactctggtgtcaggagtgagtttgctgaaaaaataagactcagtgggggaaagaaggatttggtaggacgggaatcatctgtgtaacaagtatattatttctgataagttaatccttaaaaatttaagaaaacacttcaaacaattttctcaattttttatttacatcgagttcagaatgaaaatatcagtaaaagtgaattttttttcccccaccacagaccttggaatgctaatgatttttcttctgctctatcaactttaattattttctaatcttcttggaaccttggataaaagtaaatttggaatccttttgtattcctctctgttggcttaacactagcccttgattgagttaaattcttaagcataaccgaaggcagagtcacgtgtttttctgtgataaaagagacttcaagtgtattgatattccttcgtgtacaacgcctaggacctggatctagagagggacaaagagcttgtcttggattaaacaggaacaattggatagatctggtctgactctgtgtactgcagcttgaaatctacgtaggaatgcctttttgttgtgttactgagagaataatatgataaagtagaactaaggcaccagacaggtgtggtggtacacacctgtagacccggctacttgggaggctgaggcaggaggatagcttgaggccaggagttggaggctgcagtgagcttatgattgctcctttgaatagccactacactccagcctggacaacatagtgagagcttgtctatttaaaaaaaaaaattctttcagaactaaagtgctgaaccccaatgtctggccagtgtgagtggccaaaaaggttagcttgtgtgcattgtctcattcctgtagtcccagctactcaggaggccaaagcaagaggatcacttgaggccaggagttcaagaccagcttgagtaacatagtgagaccctgtctcttaaaaaaaaaaataaaaggtcagctgctgttgtctttgtcaccattatcatgtcctctccatttcccttgcaggacttcctcaagtattccaaaaaggccagcctggatacatcagaattagaggtacatgcatcagcggctgtgggcacccaaatccccaccagcctcttttcctaatccccaagtgtctcctaacagtggtctggccctgggagggggtcaaagcagtggatgacagagtctctccagtgcatctccataagccctgcacactagagggtggggaggaagaacagaacttcatcaggtcagagggtgagcacgtcagattttccctagaggaacttgagctttcactcttctctctcccctcccacagagagctgtggaagtcatgtgcatagtacccaggcggtgcaacgacatgatgaacgtggggcggctgcaaggattcgacgtaatgcggctcttgttttttaagagagctcctctgccttcatctctttcttttgtcttggattatttctctccacatagagaaagctgatccttttcacttggttttctggcttctctcactttacctcaatctgattgatattttatttcctttttttttttttttttttttttggtgcgtttggtttgcttttttgggacttgcctgtgctcaaagcccagtgtctcatggcagaaacaagcaggaccgggctttgtctcttgggcccagtactgtaagagctgagtttcctttcctcagcacttaagaccatggttagctatggatgtagtaggacctcggaggtccccactctctcatctctgggacttgatacttcctcattagtttaagatatgtttgcatgagttgctagactattcatattacatattagctattacatatcctcaagatgaattcagaaccagaatcttcttttaaaaatttgactacggagttaaggaggcaggagaagtttttattttcttgcctactgttttgctagagaattagcattgaaagttctggtgctatggttctctctgacgcacacacagaggccgttggagggcttctgaaaactcctgtgcatgcctgatgagttcctgctggcgacccagggaccacactttgagaaccactgttctagtataaaccagacatttaaaactccacttttaatctgtgactgtaattgaggcgccagaggtctatacaaatgttggcaagaattttatttagataattattctgtttagagccaagaacagtaaaagaaaaaaaaaattaaactccataaattaataaaagaaaaatacattattccataggaggaaatctaaagaaaacagcttcagataacttagaaggcaatgttttcttctccccttccttttccccctttatttcttgttttaggggaaaatcgttgcccagggtaaactgctcttgcaggacacattcttggtcacagaccaagatgcaggacttctgcctcgctgcagagagaggcgcatcttcctctttgagcagatcgtcatattcagcgaaccacttgataaaaagaagggcttctccatgccgggattcctgtttaagaacagtatcaaggtaacgtgtgtctctgtgtgatttctctgtgccagcgcatgtacccgtcacaccgatacactgtttccttttaatgatgacataccctgatgcttcgtttaagtatttgagaattttctagtatatttcagagccttgaattcaccccatttctctttttactgtctgtgttcttgagtggctgatgtcttgtacacacctctgtgtaaccacagccattcattcttaccatgatgagaactggtcatgggtagtgtttatgcacccccttctctaggaccgaggaaaactggtttaaatttgatagcacggatttgggggattgctctatgatcagagaaaaagttcactcggtgtcttcttctcttcctccactcaccaaggaggtactgagcactcagcaacaggcgtgagggctccaggaatggcccagctggatgccctccctgccctgatgtagcttatcctctaataggaaaggaagacagagggacaaagaaaataattgccaatggccctcaagtctgtaaaagggacaaaccaagggtgaggtagagaagagcagagggcaggcctgaggtcccagcagatgactcctgggagatacatgcccccgccagggtcctcctggctctgcagctgtgcagaccctgaggtcagaagggagatgtacttccctttggtagggcctcctgccctacgccatcagggacagggaactctcagaccgtgcacacctgcgggcctcacagcacacaggcagaacattgcgtcctcccccatccgactctccgttcaggcttttgttggctgtccccagcagcctccatttgcctaaacctggggtgggtctgtccgtgggcacaggtgccaggctgggggcctctgcccaccagcacctaggagggctctggagccaaacagctggagaaggaggccgcctctgcatgaggctgggctgcgggccctcgcacctcccaccacccgcctgcccctccagactccgccttttgaggcccctcaccctgaggccatgtcaggcacagaccctctgggctcaccactacacttgagcctcccatcccctgaactgtgcgcccatcccctggacggcagccatcatctgaactgtgcacccatgccctgaactgtgcacccatacgctgaactgcacccatacgctgagccgcacccatcccttggactgcagccatcatctgaactacacccatcccctgcactgcacccatcccctgagaaccacccatcccctgcactgcacctatcccctgagaactgcactcatccatcccgggcactgcactcatccatcccctgcactgcacccatcccctgagaactgcctacccattcttctcacaagtcttttggcagaaaatcactccagcactgtaggaatttcgtatatattttttacatatttttataaaattatttgacatattttaatcatgatatcacatacaattttataacataggttttagtgatatttgagatttgtttaatggtgtcatttactccctgggaagtaagtaaggataaatactgaggcatcatagaggggtttgggaaacaggtaatcccagacgcatatttctagttaattgttcaggctgttagttcaaactattagtttaacagccttgtattccccatgtacctgagttaagaggcattaaaaagcttcagatgttttctgaggcagtaaaaatggcagttcaactgaaaagtgcttgtttcaggattgagttaggatgaacttcactttgcacttggccagtggggatcaatgtgctttaattttttgttgtggtaaaatacacataacataaatgttccatctttaattacctagctccatgggattaagaacattcatgttttgcagccatcaccatcatctgtcttcacaactcttcatcttgcagagctaaagccctgtacccattaaacagtaactccccacttccccacccccaagcccctggcaacctccactctacttcctatccccacatttgactactctaaggacttcctgtaagtggaatcataacaatagttgtattttgagactggcatatttcacttaacataacgtcttcaaggttcatccatgtcgtattgtgtgtcggaatttctttcctcattaaggctgaaaaactgtccacatagcccacattttctttgtccattcatcggtcagtggacacatggtttgcttcctttccacctgttagctattatgaataatgtttttttttttttaaggtgagttgcctttgcctggaggaaaatgtggaaaatgatccctgtaaatttgctctgacatcgaggacgggtgacgtggtagagaccttcattttgcattcatctagtccaagtgtccggcaaacttggatccatgaaatcaaccaaattttagaaaaccagcgcaattttttaaatggtaatgtgtgttctgttactagatgtgtgctttctttcctcgtgtactcacttgtatttatcttccctctcccattcatatccatagtaatgacagaacttagcactcaccactcttcaggcactgcctagatattgctttatttcatcttcacaaccaccctgtgtggccagtactattattattcctgctttacagatgagaaagctggggcactgagcggctgagtaatttgcttcgagtcccacaagttgttgagggcagagtcaggacacagagtggccatctggctcttggtctgtgcccctcgcagctacactgtcccacacataacatgtacgagggcccagtcctaggaagaggagtttgcgagaacacgagatggcattggccagagacattcacgagggccttgcacacccacacctcctttccccattaaaaaaataagagatggggccaagcatggtggctcaagcctataatcccagcactttgggaggccaagttgggcagatcacctgaggtcaggagtttgagaccagcctgaccaacatggagaaaccctgtctctactaaaaatacaaaaaaattagccgggcgtggtggcgcatgcctgtaatcccagctactcaggaggctgaggcaggagaatcacttgaacccaggaggcggagatcgtggtgagctgagatcgcaccattgcactacagcctgggcaacaagagtgaaactctgtctcaaaaaaaaaaaaagagacggttcagtacttccctgcttccgtgacttgagggattgcagagatgctgcagaacacagcgggcgtggccacactacccttccattgcctcttaatgtatttgatctctttgcaaatgttggcttcaacactggcttttaatttggtgatcagcaaagaactttgagaattcagtccgaagctatgtgcccatgtcatctgtgtcttctgggttctttgcttcatgttcgtattcacggtctgcatctatgcctgctcaagctcaataggatgttgtaatgttctctgtcacaagaaagccacctctacaccttgcgtgatgttcaagagccaggaacataggcactcagtgaaaaatctcaagcctcatggcatttttagccaagtgttatgtgctgcctgggtgttaactccaagtttccatcctgcttgcaagctgataatcatttacatctgcagctaggggtgggcgcttgaggatagggaggcacagttcctcaggtgcgaagaggttcaatgtggtgttcttatgtggtgcattgagttccaatccatagcttggaattgagaatgctctaaattttcatcattgtctttaaaatagaatgaactgcccccagattgcacgcatggtctgtgatgtcagagtttacttgacacccactcagttgagtaactagtaatacctatcccagaggattaaaggagatcgctcatgggctgggagcttgggaccctttcacctgcttcttgcacaccccttagtcctggaagaggctgtggccagcacagagtttgtagactgcctctggctcctcaacgcttgctcacacatgcctggggctggggctggggggctgcatctgcttgtcgtatttttcaaaggctttaacacttcaagagtttgtgcatgtttccatacatgttattttggcctgatttctgtgtttttctacaatgaagatgtaagaaaactcaggcacccaagtcaagagatgggacagcctcccgctccaggggcctctagtagctccttagcttccctcagggctgtgttcagcctgcagagcagaggtggtctatgaaaccgcctccacggcagccccagggtttctttttcaccccaggactctggtttaggaaagacctttgcggaagccagttggtagctggaggagttctagtcaaatctgttgccttggtcttcctgtggacactggcccttagtccgggatgtgctgaggaatgcggccccttccacccgctgcactcagccggcatcccaataccttggcaagcaggggcctcttctagctctcctgatgggtggggttgctctgcgcccctgcacggggtctgccccatgacccatcccagggtgggccctgttcctccctcaccccgcggcgtgctccttggcgccctgacccagtctctcccgctgtcttgtcttacagccttgacatcgccaatcgagtaccagaggaaccacagcgggggcggcggcggcggcggcagcgggggcagcggcgggggtgggggcagcggcggcggcggggcccccagtggcggcagcggccacagtggcggccccagcagctgcggcggcgcccccagcacgagcaggagccggccctcccggatcccccagcctgtccgacaccacccccccgtgctggtctcctctgcagcctcgagccaggcagaggcagacaagatgtcaggtacgtccacccccgggccctccctgcctccccctggcgcggcccccgaggccggccccagcgcgcccagcaggcggccccccggcgcggacgccgaggggtccgagcgagaagcggagccgatccccaagatgaaggtgctggagagccccaggaaaggcgccgcgaacgcctcggggtcgagcccagacgcccccgccaaggacgcgcgcgctagcctgggcaccctgccgcttgggaagccccgggccggggccgcttcgccgctgaactcgccgctctccagcgcggtcccttctctcggcaaggagcccttcccccccagcagccccctgcagaaggggggctccttctggagctccatccccgcctcccccgccagccgacccggctccttcaccttcccgggggacagcgactccctccagcggcagacaccccgccacgcggcccctggcaaggatactgaccgcatgagcacgtgctcctcggccagcgagcagtccgtgcagtccacccagagcaacggggtaagcgcgtcggggggcccgcgccctcccgcccccctgcctctgtcccgccagctctaaacgccaccgcggctgttctcactaactcggctgcccagcgctctccgccgcccgttgcggcctctacctgggaccaggctaaccctcctgcgggccggcccacggcgctactaactactccttgctttgttcgtgtcttctaataagagcaagccgatcattaaccttctcaacgcagcgtcttttggtttcttccatttccaaccagcagaatatcttcttggaactttcttttttaacctctgccttcctcacgcacctattttttggagggttccttttccctgctctctacctcctgtttaaattgaaacctgtacactttaagctttttgctcatcgcttggttttgctcttttatgccttaaattatctttgcggcatttttgactcatctgctggggaagaccattccctcaagaaaacttccaacagcaactcaaagcaaactaagatgaaaaaatggggggaaagaatctgtccactgggaacgctttacgtcaccgtgttgctctggaagacagagactgctctgggcacctggcgaggcggctctgcagtgcaggctggggccggtccctgcggcctgctgggctctggcctcgtttggcccatcactcatgctgccgtctcaagcacaagggttgctgtggtgggttttccctctgtttcctgcttcctcactgtcctacccacctgtttcctacagggcagatggcctggcccgtaacactttcctgaaggcatgcgtgagtgaatagaactgttctaatgagtgtatgtttgaacgctttataaatttttaaatacatttctctaaaagggtctgtgtctctctttatattaaaaaaaaaatctagcttttgcatgtctttctctttcctctggacttattaatgccttaattggtttgacttggtcttatcctttcctactattttttgttatgtattttgttaaactttaattggggaagaaattaacaaatgggtcttgatacatttatttacagttgaagtggccgggtaggcatccgctgtcatggccaccgtactgtgtcctccagagcaaggtggcctttcagttaggttggacgtgctaggtaggcaggtatgctaggcgggtgagcatagatttgagtccagtgtggggtggtggggagatgcagtcaacccagtgacgggctatacccgtcagcacttagttggatactcagtatccaggtgtggccttatagctgtgaccctcgctgaatctgccagttagcatctagagctcatcatagcctggacacattcccattcagtacgagaggagatttcagagtctgtgtttcaaaattaacacttcaactgctccaagacaggagccaatgccagtcttctctggacattcatgagaagacatgaaaaatggccacaccctggctccatcctgaatgctgtctctgaggccaaggcgcaatctgcaagtggcacgtgttcccgcgagctttaggttgggaaagttgcttttgctttctctctttctcttcctacttgttctcatgtggcagggaacctggaaagggaacttgctgaacaggatttcagacaagtcaagatgccttacagaaatgccctaaaggcctaggaagactccagagctccaaaatggggctttaaaaatgccctctaggctgggcatgatgtctcacacctgtaatcccagcgctttgggaggccgagacgggcagatcacaaggtcaggagttcgaggccagcatggtgaaaccccatctctactaaaaataaaattagctgagcatttaaaattaggtgagctggcacgcacctatagtcccagctacttgggaggctgaggcaggagaatcgcttgaacccaggaggcagtggttgcagtgagccgagatcgtgccattgcactccagcctggatgacagagggagactccgtctcaaaaagcccccacgtatttgcacttctgtccccctggagatctgcaaaggcctccttcctccttgatcacttctgtcaagctgtctgtggtcacagtcaagcagctgtgcccagcccacagcccggctccctcttccccctttagatgagcagcttctgcaaagctctgctgacagcaggagtgacatggatgtggatcaacccaaaccatggctgcaccagtccttcctgcagctcagtggtctggccttttggcctgctttattgagcagcaataaaagtgcatgcacactggagtcactccagccctgcctttcttgcacaggccaggtggccagtgccagctcactgaccttccactctgagagactgataaccacgcccactggtgggttggtggtgagaattaagcaggatagacttgaaatgcctagtacataggagatgcccagaaaatactaatagttaggattgtagtagcaaaatactctaattatgagattgtagcctggtatattaccaaaagcagctgtgctgcagaagttgttttttgtttacatattcttggaaatttagctttgtaatctcagtactcttgggcattgccatataagtcagaatactaaagtccatgctaaaagtataatgcataaatgagtatgcacaagccaaagccttccctgtacagcacgcttttttgctgaagagccacaggcaaacagtgggcacccacagggacaagaacaggaagcagactcctccacggcagagacaaagaacaggagctgggcagcaccgccatgtttttaagtatgcaccacaggtctagattcatagccctggcacctggaattcccagtggctggcttgttggctttctcaggcttgacctcatggaggagggccagaggtctcttccctctggtccttttggccagctacagcagtccgccacctgctccagcgtgtactgatactggctcagtagaccagggctgagaggcggtagagcagggttatctgacaaattgcatctgcactgacccaggatctgcccagggcgtcggagagcccagcagaagctagcacctttggagccttgggaacccatgaacatcccgacagtaccctcagtggaagcctttgagcacaagttcacgggaacgaggcaccagatgccgtttctcacatcctaacttgatagaggggacttgggcaagatgcagcttcaggcgttggcaggggatctgcatttcttctccacccagaaccataggccacgcgctagatgagagtgggacaaacactgccgtttgtgtttcttctcaggagctaacaccactctgtgtgtggcctgggtagggccttaagaaatctctgtcttgctgttgcaatcctgcctcactgaccgagtcactcaccatatgttgagttcctgctgcatgtcagccctgtgactgaagagatcgggtcccacaggggcagcggtataagggtgggggtacgcatcccacaccagaatccgttcccaaagcttgagtcacagcacctggggcgagtggcactgggatgctttgtgatatgttcccatggcagcagagccttggggacacttgagtcatgcaagttcataagagggacacctagcaagttcgtattgctggagacagagtcgctctccgtatgagcagaatagtgatcgatttacgttcaggggttccatgttcttctttttgaagagacgaagtagaaatgattaggcatgtcagcaacttagcatgattctagagtatgcattcccaatgaacattctatctggaagatttagggacttctctgttatctaatctgtcagtgaaatgaagattaattttgcatcaattaattctaatacctttttttaactgataatgagattcacagtgatgtggctatgtttgcttaggagtaacctaacgtggcgtcagcaggaggactaagatgttcccgtgagggtgcaaggaagaccacagtggaacgagcttccaaaaccaaagagtcattattgcagtgaattttttaagagcgtccctaaattgctttctagagaaattacattttcagttattgaaatagatgcacacagttagccagagggtaaaggaaatgttgaaaatttctcggtgcttgcctggtgagccctgcacggggtcatggtgccatggggcacactgacaagggatttcatgtgatcaggtctcgtttcagttcctccctgcctttctctgtcttcatctgtccctctgcagagtgaaagcagcagcagtagcaacatctccaccatgttggtgacacacgattacacggcagtgaaggaggatgagatcaacgtctaccaaggagaggtcgttcaaattctggccagcaaccagcagaacatgtttctggtgttccgagccgccactgaccagtgccccgcagctgagggctggattccaggctttgtcctgggccacaccagtgcagtcatcgtggagaacccggacgggactctcaagtgagtgcttgacagtaacggcgtcctggcaggcagcagagggagggggcacagcacccgtgaggcacacgacctcagacggggtaagcatgtggaagggagatctgcgctggtatgttagaacaggctcagctctgagcacgtgggaagatgggtggccttccatctcacacactcagactcacagggtctttgaataatctgcatttagaaatagtctgttctagcacattgttgaggaatcccatttgacatttttgtgttagtcataactcaagaaagtgttgtttgtttgtttgtttgtttgtttaagaaacctaaggggaaaatatcccctatctttgtttctttgacatacattcttaggccgcatattagtcagggtccttcagaggagcaggaccagtagggagcgtgcggagatgttggcatagacacaggcacacctcaggttgttttgtgctttgctttaatgtgctttgaagacattgccttttttacacgagttttgtggcaaccctatgtcaagcaagtctctcggtgccatttgtccaacaacgtatgctcacactctgtatttgtgtcacattttggtgattctcaaatatttcatgcattttgttattgtatttgttacggtgatatgtagttagtgatgtctgatgttaccattataattgttttgaggaacaatgaactgcacacatacaagatgccaaacataataaacgtgtgttctaactgctccaccaactgtccattcccccatgtgtctccctctcctcaggcctgcctgagacacaacaatatcgaaattagaccagttaataactctacagtggcccctaaatgttcaagtggaagagtcacatgtctctcactttaaatcaaaagccagaagcttagtgaggaaggcatgccaaaagtggatataggccgaaagctaagcgcctctcgcaccgaacagttagctaaattgtaaatgcaaaggaaataaaagtgctaccccactaaacacacaaatagtaagaaggcaaaacagcctttgctgagacagagaaagtttgagtggtctggatagaagatcaaaccagccacaaccttgccttaagccaaagcccaacccagaacaaggctccatctctctccagttctataaaggctgagagagatgaggaagctgcagaagaaaagttgcaaactagcaaactagttgattcatgaagtttaaggaaagctaatcctgtaaaataaaagggttaggggctaatgcagctggtggctttaagttgaacccagtcgcatttatttacccttctgaaaatcctggggtccttaagaaccatgctaattatcatcacaccttatataccaaaaggttaattcagttaagaaacatgaagccggttttgctgcactgagtattattttactgaatttgatggcagtttttacaactcttcatccccctggaatgcctgctgtggtagaggcatctactctgcctgtgctctagaaatggaacaacaaagcctggctgacagcacatctgtacaccatgtatttacaacacggtttactgagtattttaaggccagtgtcaacacgtactgctcagaaaacaaaaattctttcaaaatattactgttctttgaaaatgcacctggtcacccaagagctccgatggagatgtgcaaggagattcgtgttgttttcttgcctgctaagacaatatccatgctacagcccacggatcaaggagtaatttggactttcaagtcttatttaagaaatacattttgggctgggcatggtggctgacacccatcatcccagcactttgggaagccaaggcgggtggatcacctgaggtcaggagttcgagaccagcctgacaagtatggtgaaacccaggctctattaaaaatacaaaaattcgctgggcatggtggcatgtgtctgtggtcccagctacttgggaggctgagacaggagaattgcttgaaccctggaggcggaggttgcatagagcctagatcatgccactgcactccagcctgggcagcagagtgagactctgtctcaaaaaaaggaaaagaaatacataaatacattttgtaatgccatagctaccataggcagtgatgcctccagtggatctgggcaaagtaaattgaaaaccttgtggagaggattcaccattccagatgtcatgaagaacactcatgaatcatgggagaaggtcagaatgttaacattaattaacagtggtttggaagaagttgatttcaaccctcatggatgactttgaaggttttaagacttcagtgaaggaaataactcagatgtggcagaaacagcaagaaaaataggatcagaaatggagcctgaaaatgtggctgaagagctgcaatctcctcatcaaacttgaacagatgtggagctgcttcttaggggtgcgcagagaaagtggtctcttgagatggaatctactcctggtgaaaaggctatgaacactgttgaaatattggcaaagaatttagaatattacataaacttagttgacagtgcaacagcagggtttgaaaggattgattccaatttccaaagaagttctactctgggtataatgctatcagtgtcacatgctgcagggaagtcttttgtaacaaggggagtggtggcaaatttcttgttgtcttactttaagaaattgccccagccaggccaggcgtagtggctcatgcctgtaatcccagaacgtttggaggctgaggcgggtggatcataaggtcagagttcacaaccagcctggccaacatagtgaaaccccgtctctactagaaaaaaaaaaaaaaaaaaaaaaaaaaaaggccaggcgtggtggctcacgcctgtaatcccagcagtttgggaggccaagacgggtggatcacgaggtcaagagatcgagaccatcctggctaacagtgaaaccccatctctactaaaaatacaaaaaaaaatagctgagcgtagtggcaggcgcctgtagtcccagttacttgggaggctgaggcaggagaatagcttgaacccacaaggtggagcttgcagtgagccgagttcgcgccactgcactccagcctgggtgactgagcaagactccgtctcagagaaagaaattgccacacccactccagccttcagcaactaccaccttgatcagtcagcagccatcagcatcaagacaagaccctccactagcaaaaacagtacaattcactgatggtgcggatgatagcattttttttagcaaataaactgtttttaattaaggtatgtacattttttagacataatactattgcacacataatagactctagtatagtataaacttaacttttatatgcactaagaaaccaaaacttgatgtggctcactttgttgtggtagtctggaaccaagtccccaggacctctaaaaggtatgcctgtctagaagtggatttatgatgagaaattgcctcacatagttagggagactggcaagtccaaatctgcatgtggaccagcaggcttcagaccccggagagcacgtggtgcaggctgagcctgaagacagtctgctagagaacgccctcttgcttgggagaccagactttttgtgttcccttaaggccttcggctcattggatgagggccattcaccttagaaagggcacatgcctttactggacccatcaaaatgttcatcttattcagaaacaccctcacaggaatacccagaataatgtttgaacaaatatctaggcgtcctgtgacccagtcaagttacacataaaatcagttatcacaggcacctttatattttcatcctcaaactttaagagattgttggttttatctcctggttcttaaaaaaaaggaacattttctctaacagaggtcacagttcgtagaggatttcccatccccctgcacacacatacgttgaatattcagcttttctttaacgcttccaggcagcacttggtgaatgttggaaaggcataatacccacagtgtgttcatttcccctaggaagtcaacatcttggcacacagcactccgtttaaggaaaaaatctgagaaaaaagataaagacggcaaaagggaaggcaagttagagaacggttatcggaagtcacgggaaggactcagcaacaaggtatctgtgaaggtgtgttcgggggtcttcaggagtccgtgtcatcccagcatgagagaaaggatcagggagggcagagactctgcagacctgaagctgggcttgcttatgacctccctcccacccaccagccccgtgccctgcgtgtcctgtagggtcttgttaggggcactatgctggccagcacagggatgggtgcgtcctacaaggaaccaggtagacccctgcacacttccgcaggtgcacatgtggcttctaaagaatatggttaggtttgcaaatgaagcacagagactaggttctcagaagcagcgaaggtgcagagaagctatggctcaggcttccttcagtgttcctgccttaaagccaaggggaagtggctagatgtgggggtgcatatgggctctctggctgtgacagatccccttggggacaacttcagtcagctttagtcctataatcggattgcctgacacctgcggtgggggttgcctggagaaaaagaaggtatctcctgaaagggactctgagcgccaggggccagggcgttggcggctctgcattaggaacgcatctgaggaccagctggactcagcctgtagcatgagaaaaacacacatctaagcagtgtttttgtgtttgtgggtaggaagaaaaagacccacccaaattagtgtgacatgaaacttttgagtgcagtgaaaatgtggtctgttttgattgatgcccaggcaagtcagtttctgcaaatctttcaacaataattgtagccctggaatgaaaggaatacaccttaaagtagctcatttcagttaatgcttgtttgctgtttccatttcagcttctcaatcccaactacatttatgacggtgagttctgttctttttcttctagtcctagagatgattctagacctgtggggcatgtttcagagcacttgagtgtggcctctggaaatgagttttccgtggcgctctaggcgtgcatagcaggttaggtcctatcaatctgtcggggacatgtgggtgggtgtggaggaggagccagggctgatgggcctttaccgactcctttcccatgcagttcccccagaattcgtcattccattgagtgaggtcacgtgtgagacaggggagaccgttgttcttagatgtcgagtctgtggccgccccaaagcctcaattacctggaagggccctgaacacaacaccttgaacaacgatggtcactacagcatctcctacaggtgagggaggcccactcctggtgggtttcgctggctgggagcaccatcttgtcacttggcaactggaaattcctccttcacggatggatttctttggctgccttcggcactccacttcttccgtgagagcccatttcacgcctgggtgtacagctcctcatcagcacttgagctcctgccttcccttgatcctgaaggaggaggccagcgctgatggccacgtgctcagcttttctgatgcgcagtgtgttcccatctgtgccgcagtgacctgggagaggccacgctgaagattgtgggcgtgaccacggaagatgacggcatctacacgtgcatcgctgtcaatgacatgggttcagcctcatcgtcggccagcctgagggtcctaggtaagcaccgtgcaacgaggattctacgtgacccagtggggcacgtctttcaggagtctccttaagtcctgagtctgcccttacactccaagtggcctgaaagatagaacaataagtcatttgtggggcttcaaaagacagttgtaagtagcagaccagagtgtctgggatgtcacaggagagtgacctctcggcaccttatgtaaagtcgggggagacaccggagctcctgttgctgggaggaggatgggggcctgcctggtgaaggcctctggctgcccaccatggggcaccagggccccccacgaccagcttctgagttggagcagggtgctttccgtgctcctagtactcaaaacactcatatccagctacccagctgaatctggatctggtctaggttggtctcatgtagaatgtgcatgggaaaagcaggaaaggagatgtgggtgagtcccgggcctgcgcaggccctgtgcctgtctgagaccctaacagcaacccttctgggtgaatgcacgccctcctcaccccatccaggaggagccaggcccagggcggctcagtagcttgtccagagcatctggctaggaggcatctgccatggggcctgcttgctccagtgtgaagagcttgttctttctcctcagctaaaccacaagctccctggggcagaaccaatatcttaggctctttcaaaacgtcctgtagttgcctgatgtagatagctgctgagaaaggtgtggactgttctctgctgccatcttgcagaaggccggccatgcagtactgggctgcaccacaaatggaggtgcctccagaggacaaataaaactccaaatgaaagataaattgagtcctggagcaccccgtctgtagacaataagcagaatttgtcttagaacttttgtcccagatatcttaatttcctgtttttaacaacattaaatcagaagacatgttctgattttttggatcatggaacaagaaatctaaaactctagaatttggcagtaaacaataaaaggtaaagattttctaatttgtaaataacacagaaattacacaggtgattttttttttttaatcactggcaaaagctaaaggactttagaaaggtatactattcagctgggcgtagtggctcacacctgtaatcccagcgctttgggaggccgaggtgggtggatcaccaggtcaggagatcgagaccatcgtggctaacacagtgaaaccctgtctctgctaaaaataacaaaaaattagccggcgtggtggcaagcgcctgtagtcccagctactcttgaggctgaggcaggagaatcacttgaacccaggaggcagaggttgcagtgagccgagatcatgccactgcactccagcctgggtgacagagcgagactctgtctcaaaaaaaaaaaaaaaaaaagactattcataccctggaaatgcaaatgggaaaataatccaagtgtgtagttacttctatcacacaaattcagctgcacccctaaaggtcttcagaagaattatcttatgtggactattccaagatgatcttaaccatttccaaattgttctctgagagaagccactttgtttgcaggcatcagtaattttgtgttttgttttaaatctacccttggctccactcctgtctgcctgaggctattcctgcacccacaagctgtctggggtgtgcgccctcattctctccagccctggctgccttgcagagccccagttctcagatgctcaggaaacaaagccttattctcagtccagctctggctcaaggcaggtagctggtcagagtctgggctatgagaggggagtcctgaggctggaggcattggccctgcaccctgaggacaggtgcaggcccccaaactgtgtccgagagaatcatccaaagagagccctgtcatcccaccagccagggccgaggcttctgttgatgagaaaagggggccaggtgcagtggctcatgcctgtaatcccagcactttgggaggccgaggcaggtagccatggcttgagcccaggagttagagaccagcaacatggcaaaacaccatctctacaaaaatacaaaaaattagctgggtgtggtggtgtgcgcgtgtggtcccaactactctggaggctgaggtggggggatcacttgccacctgggatgttgaaattgcagtgagtcgagattgcaccactgcgctccatcctgggtgacagagcaagactctgcctcaaaaaaaaaaaaaaaaaaaaaaaaacacacagggaaaaagaaaggtgtgttttagaggagccagggagcacctgcccactatgatgctctgtctctgggtctggttggtggtcacagagtcgccatttatgtttggtccacttttctgtatatatgtaatgctcgaataaaaatgtttatttaaaaaaaagaaaaaaaaaacaccaagccctttcagttaaaaaaagaagaaaaaatatttttatgtaaataatagtccaatatttcttaatgtgagttggtagatgcttcaaatctgcctagtgaaataattttatttttattaatgcttctctctcagtactccttcacctgcaaggtcagaattaaccttaccatttataaagcactttaaaggggtgcaaatgtgccagcattaacaaaaaaagactgcagaacaaaacgtagcctttggtttaagtgattgacgtgaaattattgcttctcgtgtgtccttcagtgaagatttgaggctttgtgtgtgccaggcattcttctggtttctgggaggctgcagaggtggatcagacacgggttcacttgtagtcatgtagcggtcagcagtactcctgtgacaacagtgctagctggcagcacatggcatccaccaggactgcccactgctatgtgaggagatgatttccagccatgagtgagtcagggaaggcacatggaggaggtggccaccaccccagggagcccaattagacaagtcagcttggattggacatggtttaaggaaacgcattcccagtgacaacctggggagaggtgaggaagcccacgtgaagatagggatgggcagatgctcggcctgggctggactgcaggtcaggtgagcgggccgaaagaggggagaggaaactaagtggggagaggaggctggatgagtggggtcgggagggccaggctcccgtggaggcctagaatcacagtggcagctgtgcttcccaggggctgcctggcagcaggaccacgtggggctcccccacttagtgcttcttttcacaggaagactcttgaaaggatgctttctgttcctgtggacatgtacacagggttcattactcacaggtgatttacagttggcacttttataataaaatcctctttgtagtgtatttatgattcattaaccatgtaaaaccctgtggacgttaagtaaatactgtggactcttgatctctcacggctgtgaaaggaggcgtggggaggagagagcaacttagcctcgaggtggtgcggccaggtgaacggggaggaccatctgtagcagtgctgtccaatagaagcaaaaagaggccacatatgcaagtttagatttttctagtaaacacattttaaaaataaaagtaaaagcagtttttactaacatgtatttaatttaatgaaatacatccaaagtattagatttcaacatgaaatcaatatttgaaaaatcattagtgaactattttgcattcttccttcacactaagccccagtgtctgtgtgtcctttatgcagccaccacatctccactcgcatgagccgtgtggcaggtgcccggtggccacgcgcagctgctgtgagggacagtgcgtggcgatagccttcttacccaagaagctccacgggaaacaagctcaggcaggtgctgttcttcttgcaggtccagggatggatgggatcatggtgacctggaaagacaactttgactccttctacagtgaagtggctgagcttggcaggtatgatgcacaacccagaacgccttccgaaagagcagagcgtggggaagacataccagagagtgcagggataaagctaagcagtgttatcttgccagcaattggaagctgtgtgtcttgcatttgaatcgtaactctcattgcctttagacgctaaacactggggaagtaaggaagccattttccactcgggttccagcagagagggccgaatgccaccagtcacccctcaatggggagaaattgcttccctctgtgaatgtggaatagtggtagctctgtgccgtccttgggagagttcaggagtctttcaaacgcttcttgtagttcttaatcctcttgtgcccttcacgtttcatttgtgcatggagacttcaaggagtgacagtaaaattagatgcacaaactaagagagaggtttccccatcaaaggggttctttctcttcatgaggggcagccgagtcaggggtggcccagcagtgccatcagacagcccggcttctcttggctctgcctccagggccacacagcacacacattcaggtgttgtgtcccatgtggcaggaagagcaaggtcagaggagcatgacagctgtcctttgtcccttggtaagaactcccccagaaactccagccagcagcaccctctggcattcattcctgaggtcataactagtcacatggctcctgttgctgtctctgtcagctgtctgtggctgcataaaaagtcacaccagcacatgctgtcttaggacagtggtgacatgtgccttcttccagtgcagtgggcagatgggaccattattctgttggcctctcctggcctggtcagctggtgcaccatgccccatgcgtgtcagaggcgttgtctgggacactggcctctttccacatcgactttcaccctgggctcccccacgtgagggcagtggcatcccagaacagcaggagcaggagcgtcaaggcctctgaaggcccagcctcagaacgaccaacgtcctccacatcctgtgggccagagccagccccaggcagccctgattcaaggggacgaatagcccccgcctccgagtgacagaagtagcaaaaccgtggcctttaaccacacagtctgcccgccacaggcgcatctctggtcctcacatgtgcagaatgcactcacccacctcaggcccccagcccaggcccccacctgaggtccaaggcctcgtccagatcgcgttgagttgtggccagtccccaggagtgggtcatcaggggcagctccagggtcctcgtgcctgccccacacacccccacaggggcgaggctgaggcagtgaccacagcagacgcacctttcaaacgtgcagggaaaggtggctgacgggaggcgtgagcagccatcccagcttctgctcgtcgtgggaagcagaagggagtcgcccggcaaggccaaggctcagaggtcttcctctgtcacttccaccacacgcagtgctgggaaagcagccaccgacgtgaggagaccaaggctgcctgggaggaaggaccagcagaaccgcgtggctgcggggacaagggcagatttgggggacagccatggcaccacagcccctccgtggagtggccgggagagcagggcctctggacagggctgggccaccacacagccagtccatttaggataacagagtctttctcggtgccagacctcagcagcctctgcaaatggtccccctgacatattttacaggggcagattctctgtcgttaagaaatgtgatcagaaaggaaccaagcgagcagtggccactaagtttgtgaacaagaagttgatgaagcgcgaccaggtcacccatgagcttggcatcctgcagagcctccagcaccccctgcttgtcggcctcctcgacacctttgagacccccaccagctacatcctggtcttagaaatgtgcgtacacacctggccttccctctgcccagccctctgcctccacctcagggggttttgttgttcctgtttgttctctaagaaggatagaaattgggtttgtagaatttacagaactaaaaaacatcttcactgtcagagcccgcagttttcaagccttccagtaatggcagaaagcagtgtggtcttccacagggcggttgcctgatgaagggcagtcactgctgggatggaacacctgatatgctcagccaacccggagatgcaccccccccaccccttttctgaaggtcccatgaggccaggctgtctctggtgctgaacccaagcccccattagtggttggaggctgacctgataccccaagcctgtgcagggccagctcaccccggatcagcggggtgcccctcaggcctcctgccaagtgaaggccagttggatgggagggtaagacgcacctccccgcagaatgtcctccgaagagggggcgcgggcacaccaaccagagctgcccctctggtccccgttgtacttactgggctcctgtgtaagatcagaaaataatttagtcacgtcaagaaaagagtttgaaacctgtgtcccacaggagcggttctcatctaggggtgggttctcgtggaaatgtcaggagagctcaggctgggggtgagtccggcagggagcggccggaggccagggatgccacccaacctcctgcaaggcagggacaacccccatggattcatccaccccaaacatctgtgcatttagctttgaaaaatgtcgattcctcctttttagggggagtcattttatacatttacttgcatttacagctgcttttccatggggaagggtaaaaccttttgtcaccatttgggaagtttgcatagcttcttcagtgggaaggataggattagcagggcgcccccatggggtcatgtaggggcagactcaagctcggggcccctcgccggcaggaactccctccaggccctgtacctgatgttgtagttattgtcatttttttcttaaagaaactataaatgcctccccatacccttcctagggcaaggctgccacagcgtcccacatggccccacatgcagccttaccagcttcctcgggccgcccatgtgccatgggtgacagtgggtgtctcaggaaggcctcccacccatggctgcacagctagaacctcccccagcacatggggacgtgcttccagcccgtctttcaagaatagaaaacacatctcatggcagaagggcagacggtggggcgcagtgaggctgagcagtgtgtatggagaggaggtccactggcctcgcctggcctcagtccccgccctccctctcatcggctcatttctcaccctggtgtccttaaaagtcacactggctttggagggttgtcgtggggccgagatggggcgatgtgtgtggaagagccgagccgacatccaagccgaggcctggcctgggagcctcaggacccgggaggtctcctttctggctccagacgctggtgaccaatggccactgctcaccttccctggggagttttaacaaaactgtggcttgagtgcttgtcacaaatctcctaaaggccttcgtttctggactgacatttcagtgctttcagctgtcatttctgggaaacaaaatggtttggcctcaccatcctgttaataggatccgttttcatgacagattactcctgttctcaccggcgactccccattgctagacaggcagctgatcttcctacagatttctgttttgcaaagagagcagcataggccggtgttgagagaggtgggggccagaccacctcagtccaatcctggcttctccactctggagctgtgggaccttgggaacgtttcatgctttctctgtcctgagtttcctcgtgtatcaaatgggtacactaaggcccacttcacagagagtcataaggattaaatgagttgttagaaggcattgagcccctggcacttggcagtgctgggtaagtgtttttttagtatgaacagtagtttcagaggaggaagtcttctgagtccaacactgagcactcagtgtgtcacctcctgcccagcctgtggttacatgatctcggtgagtcttcccgtggcccattctacaggtgaggaaactacagctccgagaagcatgagctacttgccttccttcagcagataccgcaggatgcctgctgcacctggcactgccggcagccgggccacgccatcccccgcaacaggcgggtttggacccttgactgtgccgctctaccaccggcttccctcttaagatggagacaccctgtaccccactcgcatcttcccaacagagctttacaaaatccccctccttgtctagtcacgccttagaggcacggccctgagatcccgatgacacattcataacaggtgacaggtccgacatgtttacttcttactagcccaaagaggtcttcaaagcaaatcgcatcataacagtcacccgctcctgcctctttagggctgaccagggtcgcctcctggactgcgtggtgcgatggggaagcctcactgaagggaagatcagggcgcacctgggggaggttctggaagctgtccggtacctgcacaactgcaggatagcacacctggacctaaaggttggtgaggccccgggcaggtgaaggggggtctgagcacaccggcttggccatgcgggacacagagccccctctgaagccaggccaggagcccccaagtgactagggacaaaaagggtgggtggggcagcgcagacactgattgctaatctctctctctaagcgtttgcgttcagtgatgcacacggtcaggagcacactgggtaaaacgccggagccctcccagccttccacgactttcagaaagtccccatgagttttgcccggtgggtgtggcgggtgcagtggtagcttaggcgggaaagagagcattccccttggtgctgggagggaaaatgaacacccagcttcataaagcagcctggtttcattaggctacttggcacttagatctccaaagagagctgccctgtgtggatctgggtcccagctccgctgtgtcatctcttcctcctcaccctcggctgccagctgagtggtccggcctgctttgcacatgcatggcttgtcctagttgacatcctagattccttccacctcaccatagagtcccgcccatcatcacgagtaagcttaagattggatggtctgaaaatgacagttgtattctgatttccagcctgagaatatcctggtggatgagagtttagccaagccaaccatcaaactggctgactttggagatgctgttcagctcaacacgacctactacatccaccagttactggggaaccctgaattcgcagcccctgaaatcatcctcgggaaccctgtctccctgacctcggatacgtggagtgttggagtgctcacatacgtacttcttagtggcgtgtcccccttcctggatgacagtgtggaagagacctgcctgaacatttgccgcttagactttagcttcccagatgactactttaaaggagtgagccagaaggccaaggagttcgtgtgcttcctcctgcaggaggaccccgccaagcgtccctcggctgcgctggccctccaggagcagtggctgcaggccggcaacggcagaagcacgggcgtcctcgacacgtccagactgacttccttcattgagcggcgcaaacaccagaatgatgttcgacctatccgtagcattaaaaactttctgcagagcaggcttctgcctagagtttgacctatccagaagttctttctcattctctttcacctgccaatcagctgttaatctgaattttcaagagaaaacaagcaaacataactgatcagctgccggtatgttcatcgtgtgaaattgcattccaagtgagctgtgctcagcagtgcttggacacagagctgcaagctgcgctggggtggaggaccgtcacttacactctgcccaaggcagaggtcgcattgctgtatcacagtattttattcaggtttctgcaaaaaaataaaaagataacttttttaaacaaacatgaatagaattttgcaaatttaacgttttcaagatttattcaaggaaacaaaatgcctatgttcaaccactggtgttaatgaacaaagatactgtgcgtctctggggaagacgcacctaggtggcggccactcccatggccttgtctaggactcagagaccactcggctctgagcttccaggcgcctcgtctgtgtgcatctcacgcccgacgtggcttctgaaacgtgcattcaacctcaaacttttgcataaaatagaatgaatcgttttgctctgatgaaatgtaggccttacttgtatataagactgttcctgccttcggtctgtcattttcccacctgcctcccctacccaccccccacccaccacctggggcttcctctgggggtccgagggtcttcccatcacatgaagacatcaggttgggtcctgccccactgcccctccccctgttcctgccccaagccgtcaatcagattgtggagcagtacacagtcagatgaaaatactgtaaatgcactcattgggggttttttggttttacttcatatcatgtgcaatgttgtggctttaacattttatgcaactatttatgaagacctctgttgtacctgtaataaatatatagaaaaagcacatacttcgtatggtgagctttatggttttgtgtgtgtgttggggttggcgggtgggtgggtagggtcgtagccctgtgccatcggttcaaagagacttttcgtgaaatttgttggttttgaggactgtaaaagtgatttcatactctgaatataaaactggataatagggtaatgttttaaaatttattatgctattattcagaatgccaaagtattattttttttcccaaaatcagtctggacatttactactttttagactttttgacgttgaactttctgtataaaaattggctgggttttgagcttttggtaagaaataaaagccgattaagcactggccgccccgcggctggtacccaatgcccgagtcactgtggcagcattcgcactggtgtggggagtcctttcaactcaaggaggctgggtttctgggcaccctcgaagttttctggatgtctttttatctttctcgtgtgaactgcactacaaaagagaccagcccgcttcccaagccagccagacacctgggtcttgagccataaactggcgtagttaagctttgcagcttccagtgtattttatttattcttttgttgggtttttgtttgtttcttcttgtaaaattgtacagaaactttttaaaagaaattggattcgaaactggatgtgtattcgtaacctcataatttttatttgtgtattgtttcttttattatttcagttaaatttttacattattttgcatgtatatttctttgtacagagaccttacatgtttacacagtatgatgtgatgtaaatattttattttgccatcagttattttaaaaaattaaacatatttgcctgatttttgtgttaggctttttatttaaattggtcactgttgaatcagaaagacagatggctgagggagagactgatgcagagacttctcgtgggcgggaggtggcagaatgtactggattgagaaccctctgtacacactcagaaatgggagttgctcagcctcctgcagactggttcacagacaccacactcgagaccctggtatgtgccagaatgtcgactgaccgtgcacagcgaggctgtagcttgtcctggttagaatagctaaggcaccctgttgcctgatgaacacagaattaagcgagggaagagctcgttcatgctggcctcagaaaagcaaaggtaatgtccagatagattcaagaaaatgaaacagtttcatttggttgagaataaaccaaagatcctgcacctgggagaagactcgccagtggtggccctgcctcggcctcggccctgggcccacccagtccaaggggacttgcagccaagtggcttccacagctctgccaccctgctgacagtagcttattttttccaatgaccgtatcttctctcttgattctttctggctttccttctgggctgatgactttcattgttcagcacaccatcagtaacaggtattctttctcatctgtttgct

SEQ ID NO: 640 - DNA, 9126 bp, Homo sapiens
  source 1..9126: mol_type = genomic DNA
ggcagttccccagctctgagcaccctgttccctcctccccgggctcctgggagcccccgggccctcaatccccaggactatgtggccacggtggccgacgccctcaagatgaacaagaatgtggtgctggcccgggccagcggggccttgccccctgagcggctgagccgggggtctgggggcacctctcagctgcaccatgtggacgtgtggcccctcaacctgctgcggccccggggtgggcccggctatgtggatgtctgcggcctcttcctgctgcagatggcaaccatcttgggcatggtgcccgcttggcatagcgcccggctccggatcttcctgtgcctggggcctcgggaggcgcctggggcggccgaggggcggctgcgggcactgctgagccaactgaggatccgggctgaggtgcaggaggtggtgtggggcgagggggccggggctggggaacccgaggcggaggaggaaggggactttgtgaacagtgggcggggagacgcagaggcagaggccctggcacgcagcgccaacgccctggttcgggcccagcaggggcgcggcacaggaggagggccgggtgggccggagggtggggatgctgagggccccatcacagccctcaccttcctgtacttgcctcggccgccagccgatcccgcccgatacccccgctacctggcgctactggagactctaacccgagacctgggccccacgctgctggttcatggggtcactccagtcacctgcactgatctgtgatgcccctgcctccagggctaggtagagagggcccaggcaggcggcctatcctgatccttggaggaggaggaagaggaggccactgtggcccgtggccctgcccttgggacgtggagcccaggggaggtttgaaggggatcctgggcttgggcatcacgcccacctcctttggcagagggaccccagcacactaactctgggtggctgtccccaccgtgcaggggagggagtccgcagcctcccttcactggtgccttgatgctaggggccaggcctcctctgtgactctgggctacctcagtttccccattttggccagactcaccggcccactggggtggtgatgttttcgttctgttttatttttctaactctgctgaccatgaataaaagaccaaaacactacaggctggctgagcagtgctggtgggtagctgagagggagggggtgggaatggagagctctgcagaggggtggagatcggagccttcagcctcccgccgcgaggctgccacgtgcagggctggggtgcggggcccggacgcatccgtggacttggaggctggctcgggcccgcacctcccatccccagctgcccgcaacccccagtgactcgggatcccccggagagccctcccctctcggcaggagggggctgactcagggagaaatggcagtttagggcctagggggccacgtgaccctcccccaggaatgtggtgacgtcatcggaggcgtggtcgtccccaaaattagggaggaagaggaaaaaaaaaagccagaaaaagttttcttttctggagtcccaaacgaggtgcgggacggaagagggggtgaaggccagaggctcggggcttcaagaccgctgtctggagtccccctttccaggccatgtcggggcccacctggctgcccccgaagcagccggagcccgccagagcccctcaggggagggcgatcccccgcggcaccccggggccaccaccggcccacggagcaggtaaggcagcccttgtgagacagaagagccacccagctgtggcgctcacctctgtcctaccgctccagcctcccgccctggctgcttcctcctgccccttccccaagccgaggcggggggaacagccgcctgcgctctcttgggaccctagatttgggggaggaggtaacgagaggcggagagggtggctcctcaaatatacacccctcctgtcctccgccaccccacctttgatttctcttccctcaacccagcactccagccccaccccagggtcaatttttgcccccttccatctgagcagtgttaccaggccccagggggaccggaggatcgggggccggcgtgggtggggtcccatggagtactccagcacacgcaggtgagacccgggatcgtggggtgggacatgtgggatcccccagaaccgagtctgagggacccaggacaggagaaggcctatggtgatttgcattcttcctgccctggctccatcctcaggggctccctgcagacagggggggccttcgccctggaagcctggacgccgagatagacttgctgagcagcacgctggccgagctgaatgggggtcggggtcatgcgtcacggcgaccagaccgacaggtgactctgcccctcctccccgtcagcaccctgcccccttctctggactctcagacccagcctgatcgatcccccatgtgtgtaatgtgcaccccagcatggaggaagcgtggctgcaagtaccaacatgtcagccacttgaggacgggaccttgtcaaatgcaaaaagcctgtgcttccccacagccagggtcatttccacaaatgtgggtcttggagtggggtccttgcttacgacttctggcctgcgtttctcctcaggcatatgagcccccgccacctcctgcctaccgcacgggctccctgaagccaaatccagcctcgccgctcccagcgtctccctatgggggccccactccagcctcttacactaccgccagcaccccggctggcccagccttccccgtgcaagtgaaggtggcacagccagtgaggggctgcggcccacccaggcggggagcctctcaggcctctgggcccctcccgggcccccactttcctctcccaggccgaggtgaagtctgggggcctggctataggagccagagagagccagggccaggggccaaagaggaagctgctggggtctctggccctgcaggaagaggaagaggaggcgagcacgggccccaggtgagccctggggaactgggatttcaggccctacagacaatgggacaccgactgggtggggtggctggtggtgttttagggggcttttttgttttttgagacagagttttgctcttgtttgcccaggctggggtgcagtggtgccatcttggctcactgcaacctctgcctcccgggttcaagtgattctcctgcctcagcctcctgaataactggattacaggcacacgctgccacgcttggttaatttttgtatttttagtacagacggggtttcactaaaaccccagtttgttggccaggctggtctcgaactcccgacctcaggtgatccgcctgcctcagcctcccaaagtgctgggattgcaggcctgagccaccgcgcctggccaaggggctggttttggagcagagtcagaggtctgggacgtggaataggtaagggcagggcagtgcgggggagcaggatagaactgcccattggggctgagcgcggtggctcatgcctgtaatcccagcactttgggaggctgaggtgggtggatcacctgaggtcacgagttcgagaccacactgaccaacatggagaaacctcgtctctactaaaaatacaaaattagccaggcatggtggcacatgcctgtaatcccagctactcgggaggttgaggcaggagaatcacttgaacctgggaggtggaggttgcggtgagccgagatcgcaccactgctctccaacctgggcaacaagagcaaaactctgtctcaaaaaaaaaaaaaaaaaaaaaaaagaactgcctacgggcccctgggctgagatgttctcagatgagctttctagctggaactgcctggccaccttcagagacattatagcagtccccaatctttttggcaccagggaccagttttggggaaaacaatttttccatggactggggagggggatgggagggggtgggagggggatggtttcaggatgattcaagcacattacattcattgtgcactttatttctgttataataataatagaatatatagtatatataattgtttcggtatatattacaatgtatattacaatgtaatatataccgaaacaattatacaattcaccatcatgtaggatcagtgggagccctgagcttgttttcctgcaactggacagtcccatctgggggtgatgggagacagtgacagatcatcaggcattagattctcataaggagcttgcaacctacatccttcgaacacacagttcacaatagggttcatgctcctatgagaatctaacgccgctgctgatctgacaggaggtggagctcaggcggtaatgcaagtgatggggagcagctgtaaatacagatgaagctttgcttgcccattgctcagctcctgctgtgtggcccagttcctaacaggccatggcctggcggctgagggccctggtattacagcatcaggagctagagtaggaccgagcccgattcccaccttccaggtgcccctgagccagcctccagaggatgagctggataggctgacgaagaagctggttcacgacatgaaccacccgcccagcggggagtactttggtgagctgaggctgtggggtgggtgggacgtgggaagggaggctgggagacagaggggacagtggcttcctgggtctgtgaagactgatgctgtttctccctgtcctcaggccagtgtggtggctgcggagaagatgtggttggggatggggctggggttgtggcccttgatcgcgtctttcacgtgggctgctttgtatgttctacatgccgggcccagcttcgcggccagcatttctacgccgtggagaggagggcatattgcgagggctgctacgtggtgagtggctggggctgggaggagggagtcagtggctggatgcagggggcttccatccaaggtggtaactagagcgtccaagaccaaaggaggaacggtgctaaaagccaggcgactgaaagtgatgtacaaacagggcggaattctgcaagtatcaagcaagtagcttaacactggtggctgaagggaaggacgcagctcttacaagtgtggagcatcttacagttaaagagaatgtgttagattcccatgacacccctgtgaggcaggtattactactgattcctggttttgttttttgtttttttttgagacagtctcgctctgttgcgcagactggagtgcagtggggtgatctctgctcactgcaacctcagcctgccctggttcaagcgattctcatgcctcaggctcccgagcagttgggattacaggtgcccaccaccacacccagctaatttttgtatttttagtagagacagggtttcgccatgttggccaggctgttttgaaactcctggcctcaagcagtccgcccactctggcctcccaaagtgctggcattacaggcgtgagccactgcacccagcctgattcctgtttttctcatagtgtttaaataccgtgtatagtgctgggacctgaactcagatctgctcaagtctgcctttcaccgaatcacatgcaggaggctgcatgcaggaggctgcagaaattagatggctgggttgctggggttcctgttgagctgccatggctcccgcccgctcccagatcttcctgccttccttcccaacaggccaccctggagaaatgtgccacgtgctcccagcccatcctggaccggatcctgcgggctatggggaaggcctaccaccctggctgcttcacctgcgtggtgtgtcaccgcggcctcgacggcatccccttcacagtggatgctacgagccagatccactgcattgaggactttcacaggtcaggcctggcctccaccttgtctcacaatgtctgacctttcctgtctctctcatctcttcatgccccaggactgtctcttcctgtttccaaccctggccctccttcgttctttgttattgttattttttagagacggagtttcactctgttgcccaggcaggagtgcaatggcatgatcatagctcactgcagcctccaactcctgggctcaagtgatcctcctacctcagcctcctgagtagctgggactacgggtgcacacgccaccatgcctggctagttttcttcgtttttttttttttttttttgagatggagtctcactctgtcacccaggctggagtgcagtggcacgatctcagctcactgcaacctccaccacctgggttcaagtgatttgcctgcctcaacctccccagtagctgggattacgggcgcatgccaccacgcctggctagtttttttttttttttttttttttgtatttttagtagagacaggctttcatcatgttggccaggctggtctcaaactcctgagctcaagcgatccacctgcctcggccgcccaaagtgcagggatagcaggcgtaagccactgcacccagtcttcttctttgtattttaataaagacagcgtcttgctgtgttgcctaggctggtcttgaacgcctggcctcaagtgatcctcctgccttggcctcccaaagtcgggggattgcaggctagagccactgcacctagcctctctcattctctttgacatcgtcccttccccaagacctaaggccatacctctggcctctctgattccctcctgtgccccaccttctctgggttccattgttggtgccctgcaaccccaaggcttgatggccttcttggttctcttcccctgcaggaagtttgccccaagatgctcagtgtgcggtggggccataatgcctgagccaggtcaggaggagactgtgagaattgttgctctggatcgaagttttcacattggctgttacaagtgcgaggtcaggggcccccagcacgtgcaaggggctggcagtgtctagggtgctgggtagagcatgagggggaacacagaggtctggggttgatggaaacctgttgcttctttcttttttttttttttttgagacggagtcttgctctgttgcccaggctggagtgcagtggcacaatcttggctcactgcaacctccacctcccgggttcaagtgattctcctgcctcagcctcctgagtagctgggattacaggtgctggccaccatgcctggctaatttttgtatttttagtagagacagggtttcaccatattggccaggctggtcttgaactcctgaccttgtgatcctcctgcctcggcttctcaaagtgctgggattacaggcgtgagccatcgcgcccggccaattgttgcttctttttcaacaggagtgtgggctgctgctctcctctgagggcgagtgtcagggctgctacccgctggatgggcacatcttgtgcaaggcctgcagcgcctggcgcatccaggagctctcagccaccgtcaccactgactgctgagtcttcctagaagtacctgctgggttctcagttccagttcccatcctttgattgatcactctccctgacatccacctgtatgactttgtcaccaaatgctgtcttctctttctccaatcaagaaataataatccctcgagtttacaaaacacttccaagtctgttgtctcatctgattctcccagtagcccattacaggcccagtcattgttactgcctgcattttttttcttttttttttgagacggagtctggctctgtcacccaggctggaatgcagtggtgccatctcggctcactgcaacctctgcctcccaggttcaagtgattctcttgcctcagcctcttgagtagctgggattacaggcgcccgccaccacgtctggctaattttgtatttttagtagagacggggtttcaccaccttggtcagggtggtcttgaactcctgacctcaagtgatctgcccgcttcacccaaccaaagtgctgggattacaggcgtgagccaccgcccttggccactgtctgcatttttacatgtgaggatgtcagagctgagaggtgactcccccagattgcatggttcttaaatggtggaacctgggtctttttgactcaggtccagttttttttgacaactcttgtaatccgtcactaccctcctctcagtgctgggagcaagcacgcctcagggaggaggcaagatttcctctatgtatctattttgagacagggcctcactctgttccccaggctagagtgcagtggtgcaatcaaggctcactgcagccctgaactcctgggctcaaacagtcctcctggcttagcctccccagtagctaggaccacaggggcatcccaccaagcccagttattatttttttgtgtgtagatgggatcttgctatgttgcccaggctagtcctgaactcttgggcttaagtcctccctcctcgaccttcccaagtgctgggatcacaggtgtgagccaatgtgcctggccctaaatattctgtaaaggggccttgctatgttgcccaggcaggtctccaactcctgggctcaagtgattctcccacgtcggcctcccaaagcgctgggattgcaggcgtgagccatctcagctggtcttcctattaagtctcacactcaattcactgagaggggccttggtgttactcccgggggtggtaatccattgaatctgggcggtccatactctgtttagggcgttaacttacagcctatttcatccaaatactgagcggggttaagactgagatctgccaattttacttaaagacggggcgtctttgtcgaggaaaagcaggaacggcggactttgcatttagtgcgcactgtggcacccaattttggctggatatttggagcagaaaatggtgggatacgatgctttaaaatggttgcttccaccttccatcccctaagcgcccgcgcttcccaagcccacgccctgcccgaggaggggacgaaatcacccccggtgaggtcaggaggcccgtggggggaacatggctggatgagaaccgtcttaggaccccgacacatctggggtcgcgcgatcctcgacttccgctctcccttcgcgcccagagggcttgttcgcctcccgaggccgcgcttggccca

SEQ ID NO: 641 - DNA, 43723 bp, Homo sapiens
  source 1..43723: mol_type = genomic DNA
ttggggtgctctgccctctgcagtctggggtatgtgggccctccttatgccagcgaccctgacaaggtccatgttagctcatgaggactctagcaacagcctgtaccaaggtgcccccaatacatcttctatactgcaccagagacagtctgctaacacccacatcaggttgtgtcactcccttttaaaaaatcctggccggccgggcgcggtggatcaagcctgtaatcccagcactttgggaggccgaggtgggtggatcacttgaggtcaggagttcaagaccagcctggccaatatggcaaaaccccatctctactaaaaatacaaaagttagccgggtgtggtggcaggggcctatagtctcagctacttgggaggctgaggcaggagaactgcttgaacctggggggcggaggttgcagtgagctgagatcacaacactccactacagcctgggtgacagagcaagacccgatctcaaaacaaacaacaaaacctcctaattgacttccgtttactgtcataataaactccaaactctatcctggcatcaaagctcctgccaccctggctggcatcaccacctgcctgctcccagctgcaccagttcctcctgacatagtctggactacccctggggtccctgggtgcctatgggaatccagctctggccaattctgcagaagtcccagcgggactagcgcagaggccctgtccgtgtccctcactgctcactgcagtgcttggcccccagcaggtcctcaacggctgcaggataaatataataagtgccatgccctttcctgttttccctcagaggcaccctcccccgagctgggggagcaggcttctggctgcgtgtgtccttggcacccagcctctccgaggacagcaagttcactgcaggagggcggggatgggacccacagagcctggagtggagagtcccggacagagtggtgggaaaggaagcgttttcttgcttggggcgaaagggggcagcggagcggagcgcccgaaacccagcccctgcggaccgcaatctttgggaaaaaggcgcaaggtgggaacgcagggccgcacgtgggaaccgttcgcggctgccgggtttgcagcccctgcccgcgcagctgggagccgcaggaggcggcccgggactccagcctgcagcccctatcccgcctcctcccacgctccagccacggcgcggcgctacctgctgcagcctctcttctccggagaggcccgggctcctccctacacccccgcggcccagccccgggtcccaggctccggctccgggtcagcatcctcgcgctcaaggcggtcatgccggactcctgcggactacacatcccggcggcccatgcggccccgtcacgtgatgcaaggatcgccggcctttccgccagagggcggcacagaactacaactcccagcaagctcccaaggcggccctccgcgcaatgccgctaccggaagtgcgggtcgcgcttccggcggcgtcccggggccaggggggtgcgcctttctccgcgtcggggcggcccggagcgcggtggcgcggcgcggggtaagtggcggtccccacggggcaagtggcggtccccacggggcagcggcctagagaggcggaccccgcagtgtccgggtcccgggccctcacccgcgcccactgcaacccgactccggagctccgagcatcccttagttttaagtcatggcgggtgcgaacgggtctctgctgcaggcggctccgtgacagctcctgcttcacatgggtagaggagagacggcaaacgtcggggctcccaggacttcgcggcggcagtcctaacccgtgcactgagtcgggcggggcgggcggcagcgtctgagtagagagctctctagaccaggcctggtgtctcccgggctttcctaggtgcctgtttgcgagctggtcagctgggctgtagttgagttctcccagggagtgtgggaggaaaggttatgcccaccagagacccagggtcctgacggctggaggtccgcagtggggaaggtgggcagaggtgttgctcagatgtccccattcctgtttcgtttgcacagaggggttttctggtgcgtcctggtccaccatggccaaaccaacaagcaaagattcaggcttgaaggagaagtttaagattctgttgggactgggaacaccgaggccaaatcccaggtctgcagagggtaaacagacggagtttatcatcaccgcggaaatactgagagtgagtgagctacctgtgtctttgctaggctagagggaaatgcagagaaggctgggtttggtcttgcaccaggttctgtgggagacgggttgctggcaactgtctacacaggaatgctgtctccagtacttggaggccgacatgtccttcctcaggagacttcgaaagtcaggatcttggtgacctggttcaggcacacttgagttactattcagatgttgatgaaagaaagcccatcttatagatgaggcctgagtatcatcatcttcacaggtaaggatatgtccaggtgttacatgataagatgtgagttcctgggagaagtaggttctttattttattttttttttgagactgagtcttgctctgttgcctaggctggagtgcagtggcacaatctctgctcgctgctacctctgcctcccagtttcaagtggttctcctgcctcagcctcctgagtagctgggactacagacacgtgccaccacacccatttaatttttgtatttttagtagagatggagtttcactatcttggccaggctggtcttgaactgctgacctcaggtgatctgcccgctttggcctcccaaagtgctgggattacaggcatgagccatcgcacatgggctaggtcgttatcttttatgtgtgtttgtgtctttgtcacacatgcctggcattgtgttttgcccatgagtaaatgctgaatttttgcacttgtaaagttttctacttagaaacaactaaaacgttcatcaactgatgaataaaatatagtccatcctggctgggtgcggtggctcacgcctgtcatcccagcactttgggaggccgaggcgggtggatcacctgaggtcaggagtttgagaccagcctggccaacatggcgaaaccccgtctctactaaaaataccaaaaattagccggtcatagtggtgggcgcctgtaattccagctactcggggggctgagacgagaattgcttgaacccgggaggcggaggtttcagtgagccgtgatcgcgccactgcactccatcctggggaagaagagcaaaactccgtctaaaaaaaaattgtgcagtttgaaattgtatttcatgttatgttttatctcaatacaacatttgcagttgtgaaaaaaaattgcacattctcaactcctcgggatggagcagtaaagcccctcagtaaatctttttttttttttttttttgagaccgagtttcgctcttgtcacccaggctggagcgcaggggcgcgatctcggctcactgcaatctccgcctcctgggttcaagggattctcctgcctcactctcccgagtagctgggattatagacgcccaccaccacgcccagcaaattttttgtatttttagtagagacagggtttcatcatgttgggcaggctggtctcaaactcctgacctctggtgatccacctgccttggccccccaaagtgcagggattacaggcctgagccaccgcggctcgtcaagtgaatcttgattccagaaagatctgttttaagtctctagtctggaaaatgcagtgggagtctttaggtggtttgtgacttgcagttaaggagaccgtggcctgagcactggcccctttttcttctttcatctctctccaggaactgagcatggaatgtggcctcaacaatcgcatccggatgatagggcagatttgtgaagtcgcaaaaaccaagaaatttgaagaggtaggtttatccagttgagctactagagagaggcacgtagactattcagagcctgagtttgctttttttaggaacatggttgacagctgactgccgatgatctggtttgcactttttttttttttttttttttgagatggagtcttgctctgtcgcccaggctggcacaatcttggctcactgcagcctctgcctcctgggttcaagcagttctcctgcctcagcctcctgagtagctgggattacaggcacgcgccaccacacccggctttttgtatttttagtagagacggggtttcgccatgttggccaggctggtcttgaactcctgacctcgtgaaccatatgcctcagcctcccaaagtgctgggattacaggcgtgagccactgcgcccagccagtttgcactgttttaggggaatttagctttcatcgtagtgatggggaagctactggaaatgccccgaatacaaccttgagggaccaatcaagcgtggaaatggggagcaaagggattaggcttttctagcaacaccagaaaggatttctatgccgagcgggggtgcgggggcttatgcctgtaatcctaggactttgggaggccgaggtgggtggatcacgaggtcaggagttcaagaccactctggccaacatggcgaaaccccgtctgtactaaaagatgatgagccgggcatggtggcacatgcctgtaatcccagctacttgggaggctgaggcaggagaatcgcttgaacccgggaggcacaggttgcagtgagccgagatcgccccactgcactccagtctgggtgacggagcaagactctgtctcaaaaaaaaaaaaaaggaagagtttgtagtggctgatagaaacgcatgctcactcgctctctcctgttacaagttcaggccaagaaaaatcaagaaagggtttgttccacagagaacaatcctaggcacgctggtcttggtgccattttgggagggtgactggtcggtggtattgggcgacctcacggacatagaaatatttattttgggcaaacattgccagactttcctgatgacttgtggacaggacaggaagtggtcattttgggagtgcaggttgctggtagagcacctgagggctctgcccttgccttgcccagcatttgtgtgtgggagagcagtgagacctggacctctcatgctcagatctgctaagaggagagtgattgctacctctgcagcagctcatctgaaacgtgctggccgtacgctaccaaagataggtgtaaagaacaggtgtccttagccgggcgcagtggttcacgcctgtaatcccagcactttgggaggccaaggtggatggatcacctgaggtgaggagttcgagacccgcctggccaatgtggcaaaaccctgtttctactaaagatacaaaaattagctgggcatggtgtcgggcacctgtaatcccagctacttgggaggctgagggaggagaatcgcttaaactcaggaggcagaggttgtggtgagctgagattgtgccattgcactgcagcctgggcaacagagcaagactgtctcagaaaacaaaaaaaagaacaagcgtcctgcatcctgttctgaaagttgtttgtgtgggtacggggcagcctgtgagtggataaataggcctccgaggctgggatggtcccgggccctgtgtccacggatctttgcagctcaggttgcaacggtaagagtattgtcaatgagacaaaggaggtgagagtgccagttgtctgaattggttgggatgttggtcagatgacatctaaaagaacacggccattttgttattatttggttagagacaaggtctcactctgtcacccaggccggggtgcagtgtcacaatcatggctcactacagcctcaacctgccaggctcacgtgatcctcctactttagcctctcaagtagctgggactacaggcatgcagcaccacgcctggctaagttttgtattttttgtcgtgacagggtctcactgtgttgcccaggctagtctgaaactcctgggctgacgtgaccctctcccctctgccacccgaagtgctgagattacaggtgtgagccaccgcacttggccagaacacggccattttagttcccctccttagaggagtaaggccaggaatgagcctgtggtctgaaagccgtggctgttggttaatgtggagaagggaaggtggtgagagccagcccaaacccctgccgagtgagactgattctggcagctttagggagcagggatgagcccctcacaggctgggtggtagttagaggaggcagatttcagaaggccacgcagcgctctttctcagcaggtcaggcaggcagcagaggtcgggcaggggcatggggtcgagggcccgatgctggtgtgttcactagaggagagccacaagcagggattctgggtcaggtgcaggcctagggcttagtgtgcacttgtggttctgagactgtcccatgacttcctgccagcattccggcagctctagtgggactccctcctggtccaggtgaggccaccattgctgccctggcttgctgctgtcctctcagcccccagtctgtcacctggtgggagttaaagggacctgctggggtttgaggaagctctgagccgttccctgtacgaagcctgtggtcatctcaggctgcaggagacacaggagatacgagctttggaggtggggctctcagtcacaagcccccgttgttcctccctgtcctccgctcacggcactgctccagttgccggggccagggttcttggagagcacatcctcaccgctgtcccctctgctggtgacagcacgcagtggaagcactctggaaggcggtcgcggatctgttgcagccggagcggccgctggaggcccggcacgcggtgctggctctgctgaaggccatcgtgcaggggcaggtaaggcccagggcgacgctgggatgggtgacgtcaggctgcccactgactgtcctgtccctgctgggccgtgtttggactcctgcctcggtgagttgctgggcacagggtctaggggctgatgggctctggagctggatggcctgtggggtctcctggtgtcatgaggtctgtgtgaccgtaggcactgcctcctcgcctgtaaacagatggtcactgcaccttcctcttatgggatgttctggggatcatatgaggcagttctcgcagagtgctgagatcgtacctggcagctggtgtggggctacggtgttgttttgcccttgcaccctttcggggccactcccctgctcactgcattccatctgtgctggtcttggctgaccctgaacacccaggcctcttggtgttcctgcctcccctggtcggccacttctactccttcatgtcccagctgctcagaagggccgtccactctcacaggctctcctgggtttcccccactcaggccttgtcctcagtctctgagcacaaggctgtctgccctgcaccgagtgcaggggtcgggcaggagctgtgtcatcccctgctctgcgccacccgctgtgccaggtcccgacacacagcagttgctccccatacgccgctctgcggtcggccggtgcatccggccccctgccctgtacaatgctgatgctgcagacctgtctcttgcagggcgcctctgtgggaaggagaggggtccagggctggagtccgggtgcccctgcacttcagggacttcttggcagccgtgtgggcgacgctggcaggctctgctgatcctgtggcttttgtctttagggcgagcgtttgggggtcctcagagccctcttctttaaggtcatcaaggattacccttccaacgaagaccttcacgaaaggctggaggttttcaaggccctcacagacaatgggagacacatcacctacttggaggaagagctgggtgggtgccaccttgggttggaggtttctctggccttgacgatcaagtgtaacctggatgggaaggacctggggctggggaggggctgccgttctcagggatggcctgcagcgggtatgcccaccctgcttcatgcacctgggctcacctgcgtggccggagtgcccctgaggcacgtgttaaaaatgcagagtcctggccttcaccccagacctgctgactgtgagtctctggggcttggggcctccgaacacctctgcaacggcaggagctgggcgagttctgtcactgggaggtggtgctgctgacttggtctcaaccggagcgtactggtcccgtcttcctcctcctttctccactttgtggaccttcctcctgccatcctgtggtgggaggtttccattagtcttgggtctctgtgtcatgattctgggaagtagagaaagaggaggaagagatcggtctgactctggctttgctgttctgtcgcccagaaaagggcctcagtggctgggctgcctgcaggacaggtgccggccaggtgcctaccgtcaggtttcctgtctgaggtgacgtggccggcagccaagtgtgcacacgtctcctccgagccactctctgctgggggtggggaacgcccaggagtctggtgatgtcggcgtctcccagcctcgggttgggccctgagtgtacggcatacacacttctgctgccgcctcggcacagaccctctgtgcagccccaggggcggtagatcctagtgtccgtgcgtagccggcctgccctgggctcccctgagcctcttcgggcccagtgcgtggtctgtctgttgctgccgggggactgatgatggggtttctggcagtgacgggtttggacacactgtcctgcggcgggagggggaggtgagtgggagatgtagattcggcgtcctcgcaaactgccgccgcttctcccccagctgactttgtcctgcagtggatggatgttggcttgtcctcggaattccttctggtgctggtgaacttggtcaaattcaatagctgttacctcgacgagtacatcgcaaggatggttcagtaagaaaagaattgagatcctgttctgataatggtcctaagttcagctccgcagtgaataaagttgaaaccaccaaaaaaatagaggttgggctgggcacaatggctcacgcctgtaatctcagcactttgggaggccgaggcaggcggatcacgaggtcaggagttcgagaccagcctggccaacatggtgaaaccctgtctctactaaaaatacaaaaattagccgggcatggtggtgggagcctgtaatcccagctactcaggaggctgaggcaggagaattgcttgaaaccggaaggcagaggttgcagtgagcggagatcgtgccactgcactccagcctgggtgaaagagcaaaactccatctcaaaaaaaaaaaaaaaaaaagagaagtacgtagctatcttctgtttagctctcatctgatgtcttggttatctttttgttgtttgtttagaatgttgcatgagctctgtctcactcatgctgaacacccagcaccgagagcagtggctggcgcacagcaggcacctgagtgcttgttgggtgggtgggacccccagggaggatgagccatgcgtgttattgacgtcatagagtgactagaccacagcccgtggtggctcggccatccaggcagtgctgccgggactgagctcggtgctccctgcaggatgatctgtctgctgtgcgtccggaccgcgtcctctgtggacatagaggtcagtgcctcccctccccagggccggcccatttcaccctggtttctgggaggctggggcttgggggttgagccctgtgtgccacctgctggctgtgtagccctgggcaagctgctcggtctctctgagcctcaggagtcccccatgtaagtcaggatagccgggcgcctccatgtggagatgtagctcagggtggatgacagcatcaatgacccacagtgacagggacgtcaggtgcttcccacatgcccgcttgccctgtggcttggagagagggtgccatggcagcggggagaggtggcagcgcaggctgaaggaggtgggaaggaagcctgggtgtcctctcctgtggggaggagctggggtaggacgggcgtgagccgtctccctctccaccaggtctccctgcaggtgctggacgccgtggtctgctacaactgcctgccggctgagagcctcccgctgttcatcgttaccctctgtcgcaccatcaacgtcaaggagctctgcgagccttgctggaaggtggggtttctgaaactgctctggaaggttcctgagagcacatggatgggacaagggccatcctgtctcccatgaatggttgtctgattcttggggtggccagacaatggcctgttgagggacggccagtgtcattttcccaggcagttgagctgaggtcagggttttggtggcattttgagaaccctgctgcctctgtctttgggaggagatggtggcgagctggccggaccttgggtggctatagggcagcagccaggcggggccagcagcgggactggggctgggggcagggcttatgcctgccagcccctgacacgcattgtgtctcgcagctgatgcggaacctccttggcacccacctgggccacagcgccatctacaacatgtgccacctcatggaggacaggtgagtgtggtgggtggggcgcagggcagtggaggccagcacagccctcggggcagctccagtgtcccttgccaagcacacactggcttagagagtccttgtcctctcgggcagctgttccagaggctgccactagagcgaggcccatgacttctaggatccagcccctgtcctctccttcctctgtcagttcaacagaatatccacacccagctcagtgcctgccccatgctcggacgtcctccagcggtgctccccaactacttagcctgttacaaggcgaggctcggggtcttggcttgacgttgcccttgccctcacccccacagccaggctgtggccacttttgttgctttagccattagagatggctcagctctgcccacaccctggcctcccacccatgctgccagctccccctcctgctctcctgtatccatccgcgcctcctgaagcccactccatgcagcacccgggtggcctttttctgacacagatatgtcggtgtcaccctttgctggaagccaggtggttcccagcgcccttgggatgtaggcttctcctatggaaccaggccctggggccagccctgcctcagccctgcatctctcccagccctgcctcggcccctgcatctctcccagccctgcctcggcccctgcatctctcccagccctgcctcggcccctgcatctctcccagccctgcctcggcccctgcatctctcccagccctgcctcggcccctgcatctctcccagccctgcctcggcccctgcatctctcccagccctgcctcggcccctgcatctctcccagccctgcctcggcccctgcatctctcccagccctgcctcggccctgcatctttccttccctccatccttggaaccaggccctggggcccagccctgcctcagccctgcatctctcctagccctgcctcagcccctgcatctctccctccctcctcccgtagaaccaggccctgggggccagccctgcctcagcctgcatctctcccagccctgccccaccccctgcatctctcctttcctccatcttgccttctcccctccaccaagggcttgtgcatgccctgattcctcttgccagcaggttcttccacctttgccgagttactctgtttactgaggtcttagcgtggtcactgactcccccacctccctgagtagtttttgctgtggctttccttcttggctgtgattggaggaagagattttgcgtttacctgggagattatgtggctggcgcctgtctcccccagactgcgaggctgtgggccatccctcttgcctgcttcctgtccctggcatgacctgtagctcacagcgtggtcagcagtgatgggctgccgcctgtgcgcaggagtgaacaagagtgttactgctggcctctgttccctgcccttccccagcggtgctcctgccccccccaagcacagggacctctggggctgctgcaggagcctcggcaacctcacacatccatggcggaccctgggacagggccctgctcacattccgtctctctggggaacacttttagagcctacatggaggacgcgcccctgctgagaggagccgtgttttttgtgggcatggctctctggggagcccaccggctctattctctcaggaactcgccgacatctgtgttgccatcattttaccaggtaaggcggtttctgtgtgcagtgagctggcaggaacgggagagctcccctcacgcctgcccacccatcccactgggggtcctgctgcgggggctgcggtggcatttctaggcctttccaggcagttgctttgcagctgggggtgaggtttggggccctttgtaggctttagtcttttttttttttttgagaaggagttctgctctttctgcttggctgactgcaatctccgcctcccggattcaagtgattctattgcctcagactcctgagtagctgggattacaggtgcctggtaccatgcctggctaattttgtgtttttagtagagacggggtttcgccatgttggccaggctggtctcgaattcctgacctgaagtgatccacccatctcagactcccaaagtgctaggattacaggcgtgagccaccatgcctggccaaaggcttttttctctctctctttttttttttttttttttttgagacagagttttactcttgttgcccagggtggagtgcaatggtgcgatctcggctcactgcaacctctgcctccccagttcaagccattctgcctcagcctcctgagtagctgggattacaggtgcctgccacagtgcctggctaatggttttttttttttttttttttttttaatgggacagagtttcgctcttattgcccaggctggagtgcaatggcgcgatcttggctcagcgcaacctccgcctcccaggttcaagccattctcctgcctcagcctcctgagtagctgggattataggcatgggccactacacacagctaattttttatttttagtagagactgggtttctccacattggtcaggctggtctcaaactcccgacctcaggtgatccgccagcctcagcctcccaaagtgctggaattataggtatgagtcaccgtgcccggccaaggctaatgttttgtatttttattagagatggggtttcaccatgttggtcaggctggtcttgaactcctgacctcaggtgatccacccgccttggtctcccaaagtgctgagattataggcatgagccactgcgcgcagcccaaaggctttattctcaagcaaaccttacatcttgcgagtttcaccttctggagttggcagtggaggggtgaacgctgcctcgggggtagccgttctcttgctgttggcggctctgttttgtcaagtgctggtcttgtcctgtctctgcaatgacgccgtggcacagacgctggtggtacagcttcagtttccgcagtgccccgtgatgacagcgctttttgtgtccgtcctcgttctgtgctcacagctccctggagggtggggcgatcacgtcgtcctggttttatagtgatgagctgcggtgtgggtcacagggctctcctgatcctctgctcttcctgctacccccctccccgtaggggcggtggggggatgttgtctttgtgcacagcttgcagccgaactcagggcagctttcagttgctgctgggctggcccaccgggtgcccaggattcagttgctggtctgtccgagtcagggactttgcaggcaggcatgggggtggggcccgtctgggtcctgactgtgctggagcatgtagaaacccctcctgggcgccccacctgctgtttctgcggcccctgataaacgtgtggtgggcactgcgcgctcaggcgtgctactctcggtcccaagggtgactgggagggcgtcccacagcaagcaagcagctctgaccctgtgtgctggccgggctcgtgttccaggccatggcatgtccgaacgaggtggtgtcctatgagatcgtcctgtccatcaccaggctcatcaagaagtataggaaggagctccaggtggtggcgtgggacattctgctgaacatcatcgaacggctccttcagcagctccaggtggggtgggggcaggagctccggggagcaccgggaacccagacaggcaggctcggcccactcagaagatggtaccttgggccccatctctgggggtcccgcagagactgccagaaccgtgttctctggtgattcgcagtggcgctcatccaccttccaccggagacaggtctgatttttccagacgtggtgcatcgtttaggccccagacaggaatatgcagtaggtgagccggggctgggccagtgctgtccacagtccgcagagtgacctgcaggccgccttcgtggcctgagtgggccccggcacagttcccagagggatgccagtgtggcttccgcatgactttggaggaccgcattagtcgagtctgttaaccacagctttaaggaggactccacggccacacgggctcatcagcataggggccctggggaggcgaggctagtatccagcagcctcagggctgtgccttttcctggagcctggggcgggtgatgtacaggaggccaggcagcagaagggaggccgggacttcgccgggacttagcagggactgaagtcctctcagagcctgtcgctgggccagagcattgcccccgaccgctggtggcagtggcagaggtcatagcctggggcttctaaaagaggctggacctgggagaggcaagaaaggcttgtagttgtggctactcttggccctcctgcccgagcttccttcttggcccagctgcatgggcacagccaagattccttggggggtggggtacgggcaggaacagcagctgccatcacagccactgtggccccttgagaggatctggggggtgtcctgggccacgtgggtcagggtggcccctggagaggatctgggggtgtctcaacccatgaggcccggagcggcctcagagggctgggggcgtctgtccccatgcggcccagagcggcctgagagggctgagggtgtctccatgcggtgggtgtgtagcgaggcctctggtgccaagtccatgtggggagtggaagtcagcctgtgtcatcgtgcctggtactgcagaccttggacagcccggagctcaggaccatcgtccatgacctgttgaccacggtggaggagctgtgtgaccagaacgagttccacgggtctcaggagagatactttgaactggtggagagatgtgcggaccagaggcctgtgagaccccctcctgggtggggcctttgggctttggctggtggggaggggccgggtgctgggtgaagtgcagctttctgagcctcagaagccaagggccaggtgggcgcctgctttccaggtttctgcactcggcagggaaggctggcaggcacagcacgtgtttggtaacaagctcggggctagcccacccatcagtttcctcccacctgtgtggagcaagcttccatccggctctgtagagtcctgtggctcccaggcggccgcagtcattttgccaggaacactcagcttagggcccaggcttttccatgggtttggacacaagtcttccccgctgccaggagtgcctttgtgtctgggctgtgggctgcaggctgtgaggcggctgggctctgacagcaaaccagcctctcgaccagcagcccagtgtggagaaggagagcgccggaggggcagaggggcaacaccggctcttcttttgacaggagtcctccctcctgaacctgatctcctatagagcgcagtccatccacccggccaaggacggctggattcagaacctgcaggcgctgatggagagattcttcaggtagggggtcctctgtagccttgcctggcacctggagcctggccctgtctctgtctggggcccacccgggctgggtctcaggatgcccgatgagcagggccctcccctctgcctctggagagccctggctctgggtgagcaggtgctagcttgctttccagtccagcaggacaggtcctctcatgacgccactgggctccctcttttcgggggtcgtctggagagatgctccctgggaagcagagctctgtgccctgtgtgcctggccgcgggaggacccagagtcgggctggcctgcgccaggcagacgggctggtgtggggctgtggccgggcactccccacccgccccagcaggctgccgtcccgcaggagcgagtcccgaggcgccgtgcgcatcaaggtgctggacgtgctgtcctttgtgctgctcatcaacaggcagttctatgaggtgcgtgtccaggcggccgcagctgggggctcagggctatttctccgtgggcgggctgtctctgttgtgcacgtgctcccgcagagccgggctctgcctgggacttcggtcctgccggaccctctgcagcccccagcgtggtctgtttacccctgttcattcactggcttgctcgtcctgggtgcctctgccaggccttgacacgtggccaagtagcaaggaaggcacagtgcctgccctcagggagctccggccggttttcacccaacacaggagcctcttaaaaattctgtgtgagttcgtttcagccagtcttgcatggggacattgtcttccgtttcagtcctgacgttcaccctgtgcacctgcgtgatcgccagccctgcctggtctctcctctgcgggctctccctctccactccctcctctgggagctctgtggccccaggcccaccttccttgagagacatttgtgtgcctgccagtcatacccctttcccaggaggcgcagcttaggctctgaggctgtcccttcccaccgaactcctccctgcagcctcgcagtcctgccctcctgagagctgcccactctgctcctctccccagcgtccactgtccttgaattgccctttgctgggcattgcgatcccgcattctgtctgagggagctaagggcctcctggaagttcctctgggtcctctggcttctcccatcagggctggtcttgtcctggtctctgttcctgtggaactttttacctgcttctgtgaaaactcacgctgtcctcagcacagcacgcacacacacgcatattcacgcatgcacaggcacacacgtgcacatgcccacgcgtgcacacagccacacacaccctcacgcacacacgcacagcaccatgtgggaggggttctcggctgtgacagtgaagggcagggcctcacctcggctgctccttgtgagttgtgggccccgtgtctgtgcccggccgccctgcggtgctcaccagccttctgaacgaggagctggacaggatccctggaaggggccccggggtctctgagtcgcgctcagcgggtgcttgtgctctctgcccagctgtgctgaagtcccgagggacatgtccgctgcttgcgggtcggttcctgaggaattggaagtgtcacgagatgtggccctcgttgggctggcgctcattggcctcccttgtgcctgtgcaggaggagctgattaactcagtggtcatctcgcagctctcccacatccccgaggataaagaccaccaggtccgaaagctggccacccagttgctggtggacctggcagagggctgccacacacaccacttcaacagcctgctggacatcatcgagaaggtgagagccgttgtacccggggccgggtgctagcgtgccagagctccgtgggcagcaatggcctctgggccctctgtcctcctcttcgagtgaccggatggctgtgtccgtaggtgaggctcccctccctgcagggtgggtgtcccgaggcctgtgcagggcctgccactgctggatttgtgtcctgactgaaagtcctggacatgggtgtcctgtcacactctgggacagctgggctgggcctcctggaccgacgctggagcccagacctggggctggggctttggcctgccgtcctccctgcccagccaacagctttgctctttgattttcagatgcattttggtttctgcacagtcactcgggtataaagggcatctttgcttttgagcaataaagatgaaggccgggcacagtggctcacgcctgtaatcccagcattttgggaggctgaggcaggtggattgcttgagttcaggagttcaagaccagcctggccaacatggtgaaatcctgtctctactaaaaatataaaaattagctgcacgtggtggcgggcacctgcaatcccagctgctcaggaggctgaggcaggagaatcgcttgaacctaggaggtgaaggttgcagtgagccaagattctgccactgcactccagcctggacgacagagcaagactctgtctcaaaaagaaaaaaaaaaagggccgggcacggtggctcatgcctgtaatcccagcactttgggaggccaaggcaggcggatcatgaggtcaggagatcaagaccatcctggctaacacggtgaaaccccatctctactaaaaatacaaaaaattagctgggcgtggtggcgggcgcctgtagtcctagctactggggaggctgaggcaggagaatggcgtgaacctgggaggcggagcttgtagtgagctgagattgtgccaccgcactccagcctgggcgacagagcaagactcgatctcaaaaaaaaaaaaaaaaaaaaaaaaggtgtttgtggtagaaagtgttctcacggctgctgactcagaaccatgagcctgtgtgtaagtcctggccttctcttcaaaggtgatggcccgctccctctccccacccccggagctggaagaaagggatgtggccgcatactcggcctccttggaggatgtgaagacagccgtcctggggcttctggtcatccttcaggtgggtgttctgcacgaggcctctgctcccggggcgcgcatggctagcgtccaccagctgcatctgcgttgtgttggagtctgttccccagcgggacccacaccctccctggatttgctgagggtgcggtggtctcagcaggcagcagaaccttcctcctgctcttgtggagggatggatgcaagaggccccgttgtacgccctgaccagagcttgtctctgtgctcctgagtcagggccggaaccatgtaccatcctcagcgtggcgcttgccctcgtcacccagcacagcacctgggaagtaagggtggccctccattcctgccctgcagtccgtttaatatttgcagctgttttgttgagatttaatttacatatcatgcaatttacccattcacagtgaacagttcagtggttttcagtaaattcacagagctctgcagccaaccccacagtcagcttgagaacctcctgagcataccagtagcacacgctcccatcccccgttgctcccgtacccccgggtaccatcaagctgcttcctgtctctgtggatttacctactctcaacatttcatggaagtggaatcacacaaaattcatccataagatgttggatggtagaacagtttcctgtctgctgactggattgttccacccagcgccatgtgtccaggcccgtccaggctgtggcagctgttggtgctcccctccttttcatggctgagtagtattccatcatctggaaggagcacattttgtctgtccgttcctccattggtggacatttggcctgtgtccgccttgcagctgcggtgagtggtgctgctgtgaaccttctcctacgagggctccgccgggcctgcattttcacttttgggtctgcacctaggagtgaattgttgggccctaggtttagtctgcatttggtgtttcaaggcgataccaggctgttttccactggtgctgtgccattttccatccactcgagcagcatgtaagggttctgatttatcttttttttttttttttttttttttgatacagtctcactctgtcgcccaggctggagtggagtgcagtggcgcgatcttggctcactgcaaccttcgcctcttgggttcaggcgattctcctacctcagcctcctgagcatctcgtattacaggcacctgccaacatactcggctaattttttgtattattagtagaaactgggtttcaccatgttggccaggctggtcttgaactcctgacctcaggtgatcctcccgccttggcctcccaaagtgctgggattacaggtgtgagccaccacgcccggcctgcctctacttttcaaagcctcacagcatcacttacgtgtgactgtcagtgtcagtatcgtgtaaaatataatgtatgaatcagtttgctcaaaagctcatccttaagatgttggatggtagaacaatttcctgtcatgtttatatgtcatgggtttttatttcttgccatggaagttgaaagtggtgatgatttttttttttaattaattttttgagacaagatctcactctgtcgcccaggctggggtgcagtgctgtgaccatagctcagtgcagccttgaactcctgtgaccaagtgatcgtcctgcctcggaggcctcccaagtagctgggaccataggcacacgtcaccacacctggctaattttttcattttttgtagagatggggtctttatatgttgcccagcctggcatcaacctcctggcctcaagcagttctcccaccatagcctcccaaagtgctgggattacaggcatgagccaccacacctggccgtggtgtttgattaaaaaccaggcatcagccgggtgtggtggctcatgcccgtaatcccagcactttgggaggctgaggtgggtggatcacctgaggttgggagttcaagaccagcctgaccaacatggagaaaccccgtctctactaaaaatacaaaattagccgggcgtggtggcgcatgcctgtagtcccagctactcgggaggctgaggcaggagaatcacttgaacccatgaggcagagggtacagtaagcccagatcacgccattgcactccagcctaggcaacaagaatgaaacaacgtctcaaaaacaaaacaaagcaaaaacaggcatcacctccttggtgtctcatccacatgagcaccatgctctttactgactggttgggaaggggtgtgctgggctgtgggggcctatggcctgggagaactgagaacctttctgcttctgcagagggaaggaaagaggttctgttgcccttacttggaactccagccctggaggcctgagggtctgggctgcagaactgagatatttcctagttgaggcagagtcctggttctggctgctttcatttctttatttttttgagatagagtctcaccactatgtcacccaggctggagtgcagcggcacgatctcacctcactgcaacctccgcctcccaggttcaagcaattctcttgcctcagcctcctgagtagctgagatgacaggtgcgcaccaccacacctggctaatttttgtatttttagtagtgacatggtttcaccatgttggccaggctggtctcaatctcctgacctcaagtgatccacccaccccagacccccaaagtgttgggattacaggcgtgagccatcgtgcctggcctgttttcatttcttttgttataattgaaaagtaacacagttgactcttgaacagtatggggctgggagtgccagcccctgtgcaggtgaaaatccccatctaacttttaactccccagaaactttaccaacagccctctgttgactagaagccttgctgatagcagacagtctattaatgtacagctcgtgtgttttatgtattctgtgtttttacagtgaagtaagctagagaaaagcaaatgctgttaagatgctaggcatggtgactcacgcctgtaatcctggcagtttgggaggccgaggcgggcagatcatgaggccaggagttcgagaccagcctgaccaacatggtgaaaccccgtctctactaaaaatacaaaaattagctggatgcggtggtgcgcacctgtaatcccagctactcgggaggctgaggtaggagaatcacttgaacctgggaggtggaggttgcagtgacctgagatcgtgccatagcactccagcctgggcgacagagaaagactccgtctcaaaaaaaaaaaaaaaaaaaaatcataaggaagcgaaaatacatttcctgttccttaagtggaagtggctcatcaccaaggtcttcattgttgtcatcctcatgttgaggggactgaggaggaaggagaggagacacatggtcttgctctctcgggtgggagaggcggaagaaaattggcatgtaagtgacccatgaaggccagcctcgtgctgttcgagggtcagagagtttgcacaatggacacggtgacaagtttgattccccttttcctgcctgcctagtgggcccggcagggcggcagctgctgttggttccatgtggccttcccagaatggggggtgccaggcactgtgtgaacccccacctccacctcttttttgtccgaggaagggatgttgcttttatgtcataatattttgagatgaggagaaactgttaatcatttaatcatctttttttttgagatggagtctcgctctgtcgccccagctggagtgcagtggcgcaatcttggttcactgcaacctccgcctcctgggttcaagcgattctcctgcctcagtctcctgagtagctgggatttacaggcatgcaccaccacacctggctaatttttttttttttttgagacagtcttgctctgtcgcccaggctggagtgcagtggcacgatctcggctcactgcaagctctgcctcctgggttcacgccattctcctgcctcagcctcccaagtagctgggactacaggtgcccaccaccacgcccggctaatttttttgtgtttttagtagagacagggtttcaccatgttagccaggatggtcttgatctcctgacctcatgatccacccgcctcggcttcccaaagtgctgggattacaggcgtgagccactgtgcccggcctaattttgtatttttagtagagatgggctttctccatgtaggtcaggctggtcttgaactcctaacttcgtgatccacccacttcagcctcccaaagtgctgggattacaggcgtgagccaccacacctggcctcagtcatttctttcaatgattttttaatcatttaaaggtgttaatcatttctttaaaagaataacagtgtaaccacttacctccagagtgctgcaaagggtccctcaggccagatttcccctggctcctgctggcctcggccccagggttgctggaggcaacagatgctcttcacaccttgccacacgtgtctgggaggtgcccttgaccttttgggaggggctgcctacacctgggatcgccctgcagcacacactccccgccccattctgccctgtctgccacgcagctggagcttctccattgaatggactcttcctcacctgttgatgactgccctgatgatgagatgggcacgaggttgggttttactttttgctgctgtggagagagagtcctggtggtcctgggtttgaaggtcgtgtgttttgaagcacgcactctagagcagccgccccggcccctgctccgggacaagggtgctgtcttaggactgcgttttcacctcctgcgccgtggtgagctgcgtcctctctctgcagaccaagctgtacaccctgcctgcaagccacgccacgcgtgtgtatgagatgctggtcagccacattcagctccactacaagcacagctacaccctgccaatcgcgagcagcatccggctgcaggtatggtggctggggttgcgcagccagttcctgggggcccagccaggtatccccgtctcggcaggtgtggttcctggaagctgcagagacggccccaggatggggcctcagctgaccgtccctcctctgcacccactgtggccgcagcctccccagtcctggtgtccttccctctgcctgcagtccacacatctgtggcttgtcgctctaagccgcacggtgacatgggttggggcagagaaaaggacgcacggcgacttccggggcagtgcatggccctgacgctcctggtgctgcagaatctgtgaaggacctgcagcagagggctgggcaggtgggcggcacagggcagagctgagagggcagagctgagacggcagggcagggctggagagggcagagctgagagggcagggcagggatgggcagaacagggctggaggagtttcgctgagtttgcgctatagatgttggcaccaggctgagcagaggtgactgggatgggagccctccctcctagagcaggtgctctctggggccacccctgtggcctcagagtcctgttcagcctgtcgatggaagaagtggcagggctgggagctgagctccgctttctggcagttgggggcgtgtggtgctgccagaggagcgaggcgcccatcccttccatcccaggcgggcccagctgtggtggtggggacaccaggctctgtgagctccgaggcaagggagggaggaggctgtgggtgctgggcctccggtgtcaccaggacagagcctgtgtctgtgttgggatgtgggtgtgtgcacatcagcaggtggccttttctgagtgcctgtggtgctggacgtgggtctgagcaggtgggacgccgcctgtcctgggcctgcacgagcttggctctggctttcaccatcctcttcctgacaggcctttgacttcctgttgctgctgcgggccgactcactgcaccgcctgggcctgcccaacaaggatggagtcgtgcggttcagcccctactgcgtctgcgactacatgtacgcgggacctcgcccacggcccatgaggctcagggcgtcagaggcgctggggctgtggtggcgctgtttgcatgtctgagggatgtcccagggttgggaagagccaagtctgttccgttcctgctgcggggacttggcctcagctgcttctcttgcttctgcagggagccagagagaggctctgagaagaagaccagcggccccctttctcctcccacagggcctcctggcccggcgcctgcaggccccgccgtgcggctggggtccgtgccctactccctgctcttccgcgtcctgctgcagtgcttgaagcaggtgagtggggccgggcagggaccatccgtcccacgttgggccaggaggacagggagctgccacctgcctgctgggcctccctccctgtctggcctgtggagggcagccctccctcagagctgagccttcccccttccccgagcagctgcagggacagaggcctgcgctgggcaggctcccccggctgagaacagggctccatagcccttgacgctgtgcagccacaaagcagagcctcagatgctagcttccgcctctgtctctagggtccagaaggccctgtcctgacgcctcctctcctcgcaggagtctgactggaaggtgctgaagctggttctgggcaggctgcctgagtccctgcgctataaagtgctcatctttacttccccttgcagtgtggaccagctgtgctctgctctctgctccatggtaccatggccggcctggggttggggtgggggacccagtagggtttttccccaaaagactgcgagcctctgggcagagcgagtgagacccttcgggctcgggctccatttccctcaaactcagctgcactctggagcgcagattgtgccttgggcagggtggagggacccctgccccagctcgcagcttttgggactgacgtcagaggtccccagccaagggcatgtcactgaatgtggatgtctcccatctgtgcttttcctaagtggggctcccgtgccgttcacctcacattcctggtgtgttacttggcaggcactcccaccactccgaaagggaggcccttcctgggagggaggcaagaaggctccccagcccctttgccccctttcctgggcctgcgttcccagggcctccccagcccctctggctaccccgtgacctggccgctggggagaggtttcatgcctggatttggtcatcagctttcaggcccaaagacactggagcggctccgaggcgccccagaaggcttctccagaactgacttgcacctggccgtggttccagtgctgacagcattaatctcttaccataactacctggacaaaaccaaacaggtaggaggtcagagcaggacaggcgagcttgatggggcctgggattcgagggcctggcccaggtaggccccacatttttctcataaacgagtttctgccaggccagggatgagtgagttggctctgcttccctgggtggctgccagatgcccagagtggggacatccgattccctggtgcttctagctctctttggggcctgggagccatccagtgttccctgtccaccccggacagcatctctgctctctgtagagcgttgcctggcttgttcctgctgtcccaagggggaggtggccatgccggttggtggagctgggctggttctgaggcgcagggtgggcaggccagagagtctggcttctgcctccctccacgccccatcaggtgccggaaactgtcccttcacctgcgatctgcctcgcccccgtcccagtcgcattcttccacacctctctttgacatggccctccgggacgaggagctggtgtcctagagattctggcctccgctcagggccatgcccgccaggagatgctgactctgaggcttggcccatctgtgccccgggcctcagcttctgatggtggccctgtagggagctgttgttgggttcccatccctcaggctcagccccaccctgttgggccccttcagcccctctgagaggctcactgggtcctcatgggtcttgcctcaaagcatagccagccttgctgggctgcaggttctgaggccttactggcccacagtgtatccgaggggtgaggccggctttgggaaatggaagctgttcccgggacactgcctggcaggccatctggccccgggctctgcctgagctccgctcatcttctgctgtcctcatggaagacactgcccagggttggtgtgggatctggtggcttggccacttcaggcagcactgccccttgcaacagagccagcctgtgaagggcccagaaccaggggatgagagcccagcatgtctgggttctgttggcctgtgggatcgtgtcggaatgcaactgaccggagcagtctgctgtgcagagtctgctcgggtagctcagcactgctggctctgccccacaggcattcagggacttgctaagcctcggctgttctcccggtggagcactcgaggttggcgaggggtaggcgaggctgcctctgctgcaagcgggtggggcctgaggtgtcctgtctcctgcagcgcgagatggtctactgcctggagcagggcctcatccaccgctgtgccagccagtgcgtcgtggccttgtccatctgcagcgtggagatgcctgacatcatcatcaaggcgctgcctgttctggtggtgaagctcacgcacatctcagccacagccagcatggccgtcccactgctggagttcctgtccagtgagtccccgccctgcctgcgcatgcacccgagaggttcgggctgtgtaacctgtgcgggcttctctggtgccctctctcaggactccttggggaacctgggtgtctcgccttctgctgcctcagggcctgggcgtctctgcccggctgccatgagtgctctccttcctggctttgaggggcggctcctctcacccctctagtgtccatgtgaacgctcctccttgaagaagcctcttcccccccgagcagtggccctcccctggttttgggcctcctctctgtccaacagagcacacgccgcttcaggggggctttgttcgcttcccccagactgtgacttcaggagctcaggtgcctgtcccttcccctcaccgcctgtgcgcatctgggcaggccctcaatgttgagatggcagaagggcactgctgggcccgcacttggtgtagaggctggagagaagatcgtgtgtgctttgtgggccacatgcaggtcctgtcggtctttctgttttgttgataaccctttagaagtgtagaagcctggccaggcgcggtggctcaggcctgtcatcccagcactgtgggaggccgaggcgggtggatcacctgaggtcaggagttcgagaccagcctggccaacctggcgaaaccctgtctctactaagaatacaaaaattagccgggtgtggtggcgggtgcctgtagtcccagctactcaggaggctaaggcaggaggcaggagaatctcatgaacccaggaggtggagcttctagtgagctgagatcacgccaccgcactccagcctgggcaacagagcgagacaccgtctcaaaaaaaaaaaagagagaagtgaggccgggcacggtggctcacgcctgtaatcccagcactttcggaggccgaggcaggcggatcatgaggtcaggagatcgagaccatctggcgaacacggtgaaaccccgtctctaataaaaatacaaaaaaactagccaggcgtggtggcgggcgcctgtagtcccagctacttgggaggctgaggcaggagaatggcgtgaacccagggggtggagcttgcagtgagccgggatcgcgccactgcactccagcctgggcgacagagccagactcatctcaaaaaaaaaaaaaaaaaaaaaaaaagaggtgcggaagcctttcctcacggatcacacaaatggtaggcgacagctcgaattggcccagaagctgtggttggctggccatgggaccgagagttgaggccagggtcgggaaagccacgtccgtgtggccgtggccttctctcctctgcagcaccccatcgctgccgtgggcagagcagccgtgttggccttcagaggcgctgcacgggaccccggctcccctgaccaccctctccattaccgcagctctggccaggctgccgcacctctacaggaactttgccgcggagcagtatgccagtgtgttcgccatctccctgccgtacaccaacccctccaagtgagtggtcgccccaggccctgtgcctcccagccgtggcccccgctaggccttgcggcagaaagccccggcagcctttgtccccaaggcctgagcgcctcggttttttgcacttcatgccctggggatgtttccctgctgccaggatggagtgccagcccccttctcatctcaggtttaatcagtacatcgtgtgtctggcccatcacgtcatagccatgtggttcatcaggtgccgcctgcccttccggaaggattttgtccctttcatcactaaggtgggctcagggccggtgaaggctgtgtctctcggtaggccagggcttgctttgcccttggctgtccatggtcgggcagagtgacaggcaggtggagggcagtgggagggtgtttggggctgtgcctgtggcgctgggggctctgctgggcagcctgcagggctttgatgcgcggcaggcattgaggggtgggagctgggtgccgccgccttgcccctagcctgcagcttgtccctggccagggggcacccggcaggcctggtgagggcctccagcccccattgccacccctcactgtctgggtgtgctcactctgccagggcctgcggtccaatgtcctcttgtcttttgatgacacccccgagaaggacagcttcagggcccggagtactagtctcaacgagagacccaagaggtacggcctgcgggggtgtgcctggagtcggtgtggggtggggaaggacatggggctgtggcctgcctgacggtgcctccaagtcagtgagtggaaatgggtcctgtgtgccctggagtatgtgaggcagggcaggacctgcaagggccgctaacacccctcagcccctcagcaggttggccgtggtggcctgggtccgggctgcgtgtgccacgggcacctacttgtggaattgggggttggggtgcaagctttaggcgcctgagcccctcgaaggagccggccttgtctggggctgccccctcctctgcagcccccagcctgctgctagccggggactctgcttcatcaccgccgccttgccggaccgcaaagagctgagccagcctctgtgttcttgtttgcatttcatttgaacggctttctcctcctgtcccccaccttcctgcccgagctattttggctttccctagatgggaatacggcattttccagcgtgacctcaactcggaagctgttgtctccagcccctgggggccgggggccaagctcggccattacggccagagactactttctggggtcttggtctcttttcctagtgaccttcagggcctggccactgaggcctcagtgccgcctcggtcagagctgggcggtgcctgccttccgcgggtgggtgggattgcctggccagcacagcctggaatctgccgtgggggtgacccacacacgtttaatttgcactgacgttgtttgttttggtgtcatgcgtgaagccttacttgttctcagtcatgtttaccagacgtattatcatgcatttttgttttctgtctcttccccgctaactgccctttggcatggctctttttgctcatctcacccgcgggatctctccatcctgaccctgtggcctgggacctttcctcctcacccctccactggcttgttctccccttcccgggagctgggctctctggggcgttggggctccttcctcacccgatagtctgaggatagccagaccccccaaacaaggcttgaataactctccacccgtgaaagaattcaaggagagctctgcagccgaggccttccggtgccgcagcatcagtgtgtctgaacatgtggtccgcaggtagcgggactgtcgggtggggggcacggaccctggagcttggccccgtgagcacctgggtggcagtgcatggggctgcttgcatgacctcatcgtctgcccgtgtcctccctggccagcccagggggagccggtgacgaggggtggaaaggttgcattctgtccccaggccccgtatgagcacgggctggttgcacgcatccccaggccccctcggggtgccgctccgagagagccaggcgtgccgggcagcagcctccccaggctgtccccaagggccgcagtgtgggttgggggagacaccactcctggttttggccttttcgtattctctagaatggacgtttttcttcgggctttcttctcaacaaggtttattttttgttgtagctgaaagggaacaaggggcatttgtggagggtgctggggtggggcagcctgggagggcctgggtgggggctaggatcctgcagggcatgggcatgggcctgggccccaggccatggtcttagttctccccgcagtgtctgggtgcaggtgtgggctctcgggctctcggctgtcacctgcctgtgggtcatcgctgctggcactggcagaggggatacctgtctcctcctggaagcccgttgcaggccaaggggtcccatggccctcagtccatccacctcctcacctcaggccggcctctgctgggtgggacttggccaggggttggggtggtagaggtgctcggtgaggcttaaagccattttctagcacattctgtatcatgagcaaaatattgcctaggggctatgaaatttgtatcagaatgaactcccataagcctcttccctgtcactgggtgtggagctcaggcagccgctcgcctgcctgagggtgacggtggaaggccacatggggatcccagacctctgtgtgcttgccggaggcagcctgcgggcagaatgcaatctgggcctgtctgtgtggcctccgcctctctgcatgactacaccgtttcgccaggaggccgtaacctagtgctcccgtgggcttcggtgagggggatgtcggtctctagcctcctgagtctgctccgaccagtaggcctggtcttccccacccagcgtctccccgttctctgggacaatgtggtccacgtgattctcaagctgaggctcgctgggccgcccacgccctgttggggtctttccgagcgaggtcctcagccgtgcatgcgttgagctttggcccttggtgataggtggctcggcccgccctacctggcaccctgaccctggtcacggcctctccctccagcaggatacagacgtccctcaccagtgccagcttggggtctgcagatgagaactccgtggcccaggctgacgatagcctgaaaaacctccacctggagctcacggaaacctgtctggacatgatggctcgatacgtcttctccaacttcacggctgtcccgaagaggtccaggcggcactacagggctgggcgggcctgcgggagctccacgggcaagctgggtttcacgctccctgtcttctaggtctcctgtgggcgagttcctcctagcgggtggcaggaccaaaacctggctggttgggaacaagcttgtcactgtgacgacaagcgtgggaaccgggacccggtcgttactaggcctggactcgggggagctgcagtccggcccggagtcgaggtgactgcaccttcctttcctccgcgcctgccagcctcgacaccggctgtcccgagcccaggcccacgtggcaccctcgtaccagcctggggactaagtccaccctgtgcgtgggattctcttctcagctccagccccggggtgcatgtgagacagaccaaggaggcgccggccaagctggagtcccaggctgggcagcaggtgtcccgtggggcccgggatcgggtccgttccatgtcgggtgagccttggccccagccacctccacacaggcaccggggctccctcagttgctgctggtcccagtgttcaggaaggccccgagcccaggggccggggtggctggcttcaggcccggcccacgtcctgactctggggtgagccttccacagctcaccccagagccgtggagtggtggagtgtggcccgcttgctgcagaggggcctgctctgggtgctggtgtttcctgcgggttttcagctcggctcagtcctggagcccttctctgctccagcgagccgtggtctgactgcaggacaggttctgggtccctccctgtggccctgggttcactgaggccagcactgtggtgggccgtgccccaagggcagagctgccaccgtctctggctgcctgtggcactagcttgccaggctcggggggagcattcagcttgaggctggtggttttgcatcaggtaagtggtggtcaccagtcctctgccctcttcttcagggggccatggtcttcgagttggcgccctggacgtgccggcctcccagttcctgggcagtgccacttctccaggaccacggactgcaccagccgcgaaacctgagaaggcctcagctggcacccgggttcctgtgcaggagaagacgaacctggcggcctatgtgcccctgctgacccagggctgggcggagatcctggtccggaggcccacaggtactgggcggggctggcctgagcgccatctttctgccagtcacccacagagctgtggacactcaggggcgattgcagacttggccctcttgggatatttgggggtaacttttgttttttttttgagacagagtcttgctctgtggcccacgctggaacgcagtggcgcaatctcggctcactgcaagctccacctcccgggttcacgccattctcctgcctcagcctcccgagtagctgggaccacaggcgcccgccaccacgcctggccaatttttttgtatttctagtagagatggggtttcactgtgttagccaggatggtctcaatctcctgacctcgtgatccgcccgccttggcctcccaaagtgctgggattacaggcgtgagccaccgcgcccagccatttgggggtaacttgtaagtctccagaggtgagctgtgaggggcgatccaggtggctgaggtggggcaggggcctgtggcgaaccaagtgacttccatggcagagagttgccctccccgcctggaggctgcaagtccgagaccaaggtgctcctcggcaggaggtgctcctcagaggcctcaatccttggcatgcagttggttttttccctgtgtcctcacaggctctttcctggatgtctgcgtgttaatctcctcttgggaggaaaccggtcatggcttagggtccgctctggtcccttgctagccgtaattagctttctgaaacccagtctccagagacagtcccgttctgagttcctggggttgggactaaagcataccaacatgggggcacagctcagcctgttcccaggggcagagggagcccccgcagaggcccagagcccagggacagagggaggcctttgcagaggcccagagcccaggggcgcctgggtgtgccgtggctgaggggtgcaaagagtaggggttccagccctcgtggaggccttgggtccggactgtgaggctgtgggctggaggccgctgctctgaggtgcctggcggagcctggcctcgaggcaggggctgagcggggcagcagggtgggtggccgtcagagcagcgctggctccgacatcgtggtcctgaggattgtgggagggagcatgagggcaaaaccagggcccaggccaggaggcccctggggggccagagatgggtaaggggaggtactggcctcaggccaaaggtgctgccgcctccgcagggaacaccagctggctgatgagcctggagaacccgctcagccctttctcctcggacatcaacaacatgcccctgcaggagctgtctaacgccctcatggcggctgagcgcttcaaggagcaccgggacacagccctgtacaagtcactgtcggtgccggcagccagcacggccaaaccccctcctctgcctcgctccaacacaggtgagtggcatggcgggccttggcacgggctctgctcccactggcctggtgctcccggtgacggcaatgtggctcctctctgctgagggcgcccacacggctgggagtggtccctggcctgcctcagcaccattgttctccggtgtttgggaggaggctgacccgtgggaggtgtctgccctgctcaggaagctggggctggcagcttcagaagcagtaggggccctgtggagcctctgcccagcatcctccgtggggagtccagcactgcgggctccaggaggctctgcggcagcctccctccctgcctgggcccaggtttggacacctgagcccgcctgcgcactctgggcccccaccccactcggcaccgtgcttctcgccaggccctctggctcttccctgtggctgcagatggcacttagcggcctaggacgtctattcacgggaggagggaggcactgccctcctcaggtctgcccaagcagcttgtagctagcactgggccccgtgcgcgcccctgccggccgctggccctgccctctctcctctgcaggcacggggcctgtgctctctgctcgacctgtgtgtagcccctcctcctgctgacgtggccgcacacggccttcccttgcagtggcctctttctcctccctgtaccagtccagctgccaaggacagctgcacaggagcgtttcctgggcaggtatcgcctctcagagggaagcggttggctgcagagcgccactctgcctcataggtgctgtgctcgtcgcctcatccgcccacccccatggtccgtctgcctccattgccctggggagcaggtcccgactcgcatgaggacgtctgtgcagaatgtctttggcttggccagcgggatccccttgacttggtccctttgtggctgagccctgttcccacgctgtgcgagcactcccggcccagcttcaggcctgaggggtgggggtggcctgagtctccatggtgacatcagctgagctgcagactctgatgggtggcagctgtttagggggaagcccacccctgggcctgcaccgagcgggccttgccctggcctttggtggctcccctggcctctggaacccacagatggggctgcctcaagtcccaggttgaccaggggccctgcagaccgacctctgcctgttgcccccaagccctggtggggagtgctgtgacctgcatggtgctcccctgccaggtctccacgtgcagacgagctggtttggaagggctgcgtgggacgggccctggggtggctgactgcgcgtgtgcagggctgtggggcgcccgggggctgtgatggtcccctctgttgctgcttctacttcctctccccctgtcctgacgctggcacaggaaatgctgctttgggacctcccaccctctctccttagcgtccccagctgtgggtctggcttggagttggagggtgagcctctgctcttgggagcagtctgtttgcaaacagggacttcccccacgtcacggagtctccgcagctctcctcggttacgagggctggtttcaggctcccgctcttttagagctgaggcccgtcgggcggagagcgtcttgcccctgcctacctggaggcacaggggtggctgctggtggacactagggtgggcagagccgattgcctgcccaacccccgggcactcatgcaggagaggcctgtgtcggggtcacgtgcaggccttcccagcgtcctccctgcccgctcggtggatggcagcagtaagcagagccctggggaggctcgcagggctgctgtccctctggtcaggagaaggctggttctcggaggccacgtcagggccagggcctggcccagccccacatccagcagccccgtctgtgtcctcccagactccgccgtggtcatggaggagggaagtccgggcgaggttcctgtgctggtggagcccccagggttggaggacgttgaggcagcgctaggcatggacaggcgcacggatgcctacagcagggtgagtgtggctcagagcctggaccctgctgacctcggggggctccttaggggaggcagggctctgcgtgggtgtgcctgcaccctgggaactggctctgaacttgggggagatgttcttccacatccctcgtgcacagacggtctgcactttgcagccatccacctgggccggccctggctgctgggcagcctgtggtctcaggggatgctgatacctctgctcacgcagtgtggggcacagctggtggcagtgctgctgcgtcaacgggcgggggccgtagcctggtgctcgggctggtctgtggccctgggatggaggacagatagggcctcaccacctccaggtcaaccccaggtgggctcgagggtgcctgctgacaggggttctctttgggatggtcctttctagtcgtcctcagtctccagccaggaggagaagtcgctccacgcggaggagctggttggcaggggcatccccatcgagcgagtcgtctcctcggagggtggccggccctctgtggacctctccttccagccctcgcagcccctgagcaagtccagctcctctcccgagctgcagactctgcaggacatcctcggggaccctggggacaaggccgacgtgggccggctgagccctgaggttaaggcccggtcacagtcagggaccctggacggggaaagtgctgcctggtcggcctcgggcgaagacagtcggggccagcccgagggtcccttgccttccagctccccccgctcgcccagtggcctccggccccgaggttacaccatctccgactcggccccatcacgcaggggcaagagagtagagagggacgccttaaagagcagagccacagcctccaatgcagagaaagtgccaggcatcaaccccaggtgggcctcttgcttccgggcggggctcctgacacctctcctgcgggaacctggtgcctcacttgccccaggccgagcgggctggggtggggtcctcgcctgtgccctagggctggctggaacccctgggagggcggtggagtgggagatggccaggctctgtgttcctccctgtgggctgtggctgccctggccaggccctcacctgggtgcccaccatcccctccctgtgcagtttcgtgttcctgcagctctaccattcccccttctttggcgacgagtcaaacaagccaatcctgctgcccaatgaggtaggcgtggcctccctctcctgcatccgctggagctgtgtggctcgggtgaatggtggggggcccagctctgctgctgggagctcaggcttgcagagggctctggcctaagctccctgtggcagcctgccgtgaccggcctgggtggggcggcctcctgtggacgggcgtctggggctcaggcagggctctgtgtgccacagtcacagtcctttgagcggtcggtgcagctcctcgaccagatcccatcatacgacacccacaagatcgccgtcctgtatgttggagaaggccaggtgaggctgcggggccggcctaggtgcctggacagggccagctgggcctcagcctgcagtgggtagggagtctgggcccccaacgccccacagagctcaacactgccgggtcccctacagcatgaagtgctcattgagctctgtgccaggtgctgctctgagtgctggggaccccggtgcgagtgacaggttagcgtgggagcacccggcacaccaaggagtgggaaggactgggcgggtggcaccggtcgcagggctggggagggcgctgttggtcagtgagctgacagctgagtggtgagggagcgggcagggggagcctgcataaggggtgggggcatcccacacaccagcagcgggggccgggcgcaccctgcccagcttgagcactggtgctgggcgagcacgggagccgacaggatgggcagcctcagcgccctataggctgcaccttcatcccaagggaaagggcagggcctgggctgcttctgagcagagggcacatggcctgactccgcccagtctcagtgagtccctcctgctgtgtggctcgaggaggtgggtggtgatggttcccgtgggagtggggtaggcccctgggggcaggctgctgaggggccagggccccgggtgtgctttgagtgtggagctccctgattttgccggccaggcacacacggggctgagggaagagagggagtcaaggatgacacccgatgtctggcctgggtggctgctggaatggatggtcttgtctgcctcagggatcagagtggggctcccggcagagcctgctgggcacccccaccctctgcggggcagggcccggcccgggagtgatgccaccctgcctctcccctctccccacagagcaacagcgagctcgccatcctgtccaatgagcatggctcctacaggtacacggagttcctgacgggcctgggccggctcatcgagctgaaggactgccagccggacaaggtgtacctgggaggcctggacgtgtgtggtgaggacggccagttcacctactgctggcacgatgacatcatgcaaggtacggcctggcgcctacccgctcctgctgccccaggcctcagggcacggctcccatccagtcctgctaccccacgccctggggcatggccctggcacccccacctgctccagctccccacgcctcaggttccgagcctaacagcgtgggcatggaggcagtgatggggctggtggctttgcgtcccaaagccctgcccctggggagagccgaggaccactggccaggcaccagaggacgtggtccccgcaggcccccagagcccctggagtaatcaggaggtgccccagtgcaaggcacagagggcctcagcactggccccacaaacccatccggccctgctcaccctcagccgtcttccacatcgccaccctgatgcccaccaaggacgtggacaagcaccgctgcgacaagaagcgccacctgggcaacgactttgtgtccattgtctacaatgactccggtgaggacttcaagcttggcaccatcaaggtgagtgaggggccgtcagtgaggctgggccccaggcaggtgcccactgctgtgtcccgggttggtggcaggtcctcctccctgagcttcggtcacgaggagcaggaggagaggccgcagtgctcagggccccgtgggcacgagcttcaccccgagcctgcgttgtgtcctctgtgccctgaagcctgtggcgcctgctgctgagtgtctgtcaggagtaactggcaagtgcagactgggtgtgctgggtgggcacagtgtagttggtgcttcctgtctgtccggcgcggcccttgggcccccaccatctccccagtggcagctgtcaggctgctcagttggttatcgccacgcaccactaggcagcaaccagcgtcaccctcttcctggaggtgggctgggtcggccagtgtcacagcacggtccgggtgagccccagcatggcggggagagctggcatggcccaggcagggcagataggctggaggcctcactccaagggccccaggatgctgaggcagccactgaaccaaaaccccggggctggtagtcagagtccaggaggggcaggagcatagggaggtgggctctgctagatgccaagacaaccagttgggggggggggggcacctgggcggctgaggagggtgtggtggtgccgagatggggtgcacggctcacttcatggctgggcagacggattcggacgtgtggctgcagacaccctgggggccccagtgagtggaggtgccccagcaattagaggtgtcttgcctgtggctgcagcatatgtgggtgctgcgcccagatgtggagggggcttggcctgggggaggccagacaaacacagccccgctgccagaggggaaagttcaggggcagatgctgcccatggagctgacaggtgtctagcagtgcaaccaggcagtagccgagatcagccttcagcacacgctgtgtgcggggatgaccctttctcttgtccgggcagggccagttcaactttgtccacgtgatcgtcaccccgctggactacgagtgcaacctggtgtccctgcagtgcaggaaaggtagggccgggtggggccctgcagtgcaggaaaggtagggccgggtggggccctgcagtgtggcgccaagagccctgggcctggcgtgaccaccaagtctccccagacatggagggccttgtggacaccagcgtggccaagatcgtgtctgaccgcaacctgcccttcgtggcccgccagatggccctgcacgcaaatgtgagtgggggtgggtccaggcgtgagctggtgggacaggcccaggtgccacctgatagtgagctcaccccctgcctacgtccccagatggcctcacaggtgcatcatagccgctccaaccccaccgatatctacccctccaagtggattgcccggctccgccacatcaagcggctccgccagcgggtagggaatatggggctccctcagcggggtgtgctggctgcccaagctgtggggcgggtgtgtgggcagagcggttgccacgcctcccagacttactgcccaagccgcctctgccttcagatctgcgaggaagccgcctactccaaccccagcctacctctggtgcaccctccgtcccatagcaaagcccctgcacagactccagccgagcccacacctggctatgaggtgggccagcggaagcgcctcatctcctcggtggaggacttcaccgagtttgtgtgaggccggggccctccctcctgcactggccttggacggtattgcctgtcagtgaaataaataaagtcctgaccccagtgcacagacatagaggcacagattgcagtcagacagctcttttattgactttgtctgcttggtgcgggggttgggggggtgtcgaggctctagaagcggccatgcccacagaagtggtacacagaagcaggcacagccagctccgagggccttgaggctgcctgggccatacagcacactcgcgcgtgcgcgcgcgcacacacacacacacacagtcaccttcctccaccctgggagccagcccccaggaggagtcttttcctctaaccaccctggggtcctctgacatgcctagtcctgctacttgcccagacctgatgccagcaggcctgggcgctgctctcttgctacctggcctggggcaagggaggatgacaaggcctctggggtgatgagagtgcctggcagacagctgtgcccccagcaccggcccaaggccaagctcgcatccaagcagcagccgggctgccataacgccaccacacctaccaagcgcagcaggtgttgggggaggccagctctgggcgcaggcccctcagccctagtgaaaatagtgacatacaaaaatatacacattttaacaccatataaattactgacacgagacacacagtgagacggtgcagggagtacggtaggaactggagaggtaataacttaggggcagggtggcggcggtgcaggctaaccctccctgaagccagcagccttagcagtgggggacatctgcccagggggtggggccgggcacagcccgctgtacctgaggactcggggaaataaattagcatctcagaggctagaaaccgtccaatactgctgtgtccttcccaagggagctggggaggggaccctgggtcctggttggccacacagcctctttaaagtgctgaagcccacagacagacagatgcccctgcctgctctctggggaacctacgtgcagccattctgcctggccctcggccttgacagcggcagaaagtaatactgagcggtgtccactccgactccacggcccacccccgccaggaaggaggactaagtgctgctggggtggaccttgttcttggcccgaaggggtgtcctgctggggccagtggccaggtccacaccccgactggcccgggcaaggcggctgggcagtgctggccgcaggcccggggatgggccacgggaagatccggcgggcgcccggctgctcctgcggccttgcaggctgtgcagctgctgctccagctggtagacgtcctctgtggcctggttgagtcggtcaaactgggtgagcagggcctcgaacacggcttggaggcgggagggctcaggctcacaccttgtccccagccggcccaggctcacgctcagcccatccagctggctggaggaggtggaggggtgcgaggcatcggagccagcgctgggtgggggcacatccggggataccttggagcccctggaggagcgagagggcagcggctccatcccttcaaagcggactttgtggcggaactgggggcggcacagggg

SEQ ID NO: 642 - DNA, 515620 bp, Homo sapiens
  source 1..515620: mol_type = genomic DNA
ctaatcagagtagggggaatactggtagatcagacgtcactcaaactcatgagaattatctgtttaacatccacaaagcaagtagcccaacaagcaaggtccccaggagcctactttatcctcaaggaatctgcttagtcaattgacgtattcacagggctggagaggtatgagtggtggttaccttcgtgccagagcagaacatgccttgtagttactgccatattctagccaagttactccatttactgttcctttgttcctaaattaacaaggagaaaagactgtgtgttcaacacatgaccacaatagagaggttatttagagaaagcttaaaatgtacttgtgttttctgtactaggcctagggcaccccagttatgaagccttggcctgagtttctctctagacggtgctgaattgccatctagttacctattctgacaccaggaacatgattcttcaacaaacattgacggaagcttacatgggaccggatcacagcgctgagaagcactggggctaaggggcggcacaaagtctagatatggtggcagcacctgctcataatgaaatgcccacagtttagtggaacacagctgctattactcacctgtctatcattttgtttgggagagccctggtgggagaggagtatggtatttaatatttaattgagcagttatatgtgaaagagcgttttcacgagacttaactcctttcatcctcaaataaccctacaaggcgggtactattctatccctatgttacagataaggaaactgaggcagagaagttgcgtgcttcatcaaggtcacacaaccactccgtggaggcaagttgaacacaggctgtccggcttctgagagccagtggagaggagggagacggtgggagacgggcagggggaaaaggtggaagtagacccgaagggcaggcttgatcttcataagagaaaacagtactaacaccatccactgattgactcgcatatttccatcacttaaagctcctggcgtcactgccaggaatggaaagttaaaaaactcccagctctgtaaggttctgcctggatcctgaaaaaaaccttcccacatgccccgaggaaactcgagggctcgcttctttctcacatccctggcccggggcaccggaggtcccgctccggcggaggaactacaacccccacagcaccgcgcgcgaagctgggcccccctgagggaagggtaaggtgtcccgaaggtgccttcagaaaaaaattacgtacgtttttcgtcgctttcccacgatcacacagatctcaggtccaggaggacgcatcgtctttttagtaacagtgcatgctgtgaggcttgtagagtcgcctctctcttcaggcgcagcagagggcggccgcaatagtacgctcgcgcggcggtggcgggtggtggtccttggaccacgcggtgggcggagccagcggcgacggcctcccctcccctccggacgcaggccggaagtacgtgagaggagacttccggccactgcgttgtagtcggcccggctgcaaagcgtttttctgcaggctgttttcccaggttccctcggcctgtacctcgcgcactcctcttgctccaggtccttcagtctccgctcgtctcaccgtaggctgtgacgacatgagcaacaaagaaggtggcgtccttaacaacacggggcgttatttatccggagggggaggttctccagtctttctatgcagttttccccttttcacccttgaaggatgccttcgtcccttgtagactcgggggcggcccctctgtttctctccccggccagatcggccctgtttacacctccttttttcttaaatttttgaggtgtgattttatcctagttcagtaattgctgtaatgccagatcatagcaccagttggtggaaacttggatgatttgcttggaaaggcctgggcagcgtctctgtcagtctgcggagaaagcctctaaggcgagggccctgtgggtatctggttttaaagcaaggagtaggtttgtctatgttgtgttttgcaaactcttggtgatggaagatccctctctttttttcttctctatataaggatcaggagggttcaggaaaaggaagcatgacaatttcccacataaccaaagaagagaagggaaggatgttaattcatcttcacccgtgatgttggcctttaaatgtaagttctctgcaatgtaagttgaagaaggggagagaacaaaattatttagccatggttatgcgcaagaaaacagtccctaagaatttaatgtgaaactttagctggaggttttgtgatggcgctagatgtaccctaaaagtctggattacaaaggccttcacttttatgtcccattaagagaaatattagtaatcaggtaaacatgacttaaacacaagaaacagtaaacattaattaatatttgacatgtcacatactcaagaattgtgtacctgataatatttactcatctgttatatgctaaaatatattttcatttagtgtgtatttgtttcctctactagacttgaagacagggacggtatctttgttttaactgtaacacttagcacagagtgggagcttgtatctattagtgaatctcgcatatctatatacacatattttcacagtccccttttctcagcatattaacttggacaagttattcctcaattcaaaacaaacacaaaacaaaatcctcttccttttgtccctgtctatccactatcctgtaccttacgtttctgtgattaaggaatctgggaagggcttagctggttgattcctatttgcaatcacctgaagccttgattggggctgaaggatctacagctgttgatagtttaggccttttgcctgcaaccagctctctgttcctgtccacatgaacttcttgtgctgcttggatgtcctttggtgtggcatctggcctccttcagagagagagagtgcaagagagcaaggaggaaaccacaatctctatgtcctaatctcagacatcagacactgtcatttttgtcacattgtgtttgttagaagggaggcagttttaaaaactgtctcacattgaagaggaaggaagttatgtcccaccctttggagggaggagtctcaggttatttgtggatatatttgaaaaccaccacagtatctactgtgatcgtcagaagtttaagacagctggccgtaattgaataaagagcgtactgatacagaaggtggagttgcggctgggtgtggtggctcacgcctgtaatcccagcactttgggaggccgaggcggggggatcacgaggccatgagtttgagaccagcctggccaacatggtgaaaccctgactctaataaagtacacggtgaaaccccgtctctactaaaaatacaaaaaattagccgggcgtcagtagtccccactacttgggaggctgaggcaggagaatggcgtgaacccaggaggcggagcttgcagtgagccgagatcgtgccactgcactccagcctgggcaacagagcgaggctccgtctcaaaaaaaaaaaaaaaaaagtacgaaaaattagttggtcgtagtgggaggtgcctgtaatcccagctactcgggaggctgaggcaggagaatcgcttgaacccggaacgcggaggttgcagtgagccgagatcgcgcctttgcactccagccccggcgacagaatgagactccatctcaaaaaaaagaaaaggtggagttgcttctaaggtggtgtcctcattacccgtctgctgaactacagttttttggtttttttttttttttgagacagagtctctgtcacacaggctgagataataattaggcacgatcttggctcactgcaaaacctctgcctcctgggctcaagccattttcctacctcagcctcctgagtagctgggactacaggcgtgtgtcaccatgcctaatttttttaaatttttttgtagagacagggtttcgccatgttgctggaggctggtcttgatctccgagctcaagcagtctgcccgtctcggcctctcagagtgctgggattacaggcgtgagccactgcgcctggcctgaactacaattttctttaagacctagctcaagtagcctctttcctgtgaatgcgttctgatttttctctcaagccgacttggtgaccaacatgaaatatttattgagtatctgctatgttctcgcatgtattagtagtgaacaagaaacgtggtttctgctttcataagttttttacatatatttgttatagcatgattacattttatttgtttacatctctgtccctcatacaggactgagctccttgaggataggaattgttccttatctaactttgtgttcatagtgtctgacttacagtggtcattaatatagccataataaataatgaatacatattgattatcttaaccctggcctagttattatctcagtaataaaagactagatatatttagatccatgtcagctactaatttagttaatagtttaagttcttgttttttcagttcgtgcaatatacatgattgggtgtttcctataggccaggcagcttgcggggctgtggagtgaaaagacttgggaaataaaggcgttattaagagagttaagtggtttaagggtatttcaaggtacagagcttgataaattcaggaagtttatacttgaaatttgctaagtaagtagatcttaaatgtttttaccacaattagctgggcatgacagcatgcgcctgtagtatgcttatagtcctggctactccggaggggctggggcaggaggactgcttcaactcagaagtttgaggctgcagtgagctgtgattgggccactgcactccaggctgggcaacagagaccctgactcaaaaaggaaaaaaaaaaaactaactgaggtgatggatacgttaattagcttaatagtggtaataacacacacacacacacacacacacacacacacacacacacacacacacacacacagttttggtttttttttttttttggagacaacgcctcaccctggcccaggctgaagtgtgcagtggcgtgatcttggctcactgcaagcgtagcctcttgggctcaagtgatcctcccacctcaacctcccaagtagctgggactacaggcatgtgccaccacacgtggctagtttttagatttttttgtagaggcagggtctcactgtgttgcccctgctggtctcgaactcctgggctcaagtgatctgtcccccttggcctcccaaagtgctggggttacaggcataatcaatcatgcctggccttataatttttaattgtcagttataccccagtaaaggtggaaaagcaggaagacaacagggaaaaaaattttaataaacttgaaaaaaaaggtccaagtttctttttttggaggtgtttatattattaatatatgtggttaaagtaatttttaaaactttatgtaactctttgttacgtgtcattttgtgataatctcttgtttactaagttcattttttacaacttgtacagtattcccattgtgagactaagtagtaaaacccagttaatacatacctatatttaaagaggaaaatattttagttgagcctttttgatttccatgtaatttagaaataagatgattttattctcttcattttcataaactgaataattattgctttcttacatatagagacagtacttttaggtacagactgtttttgctttctagccatttgtattctaagaaaattaaaatcatttcccttttttttcctttcataagatttaccaagtgttttggaaaagtttgacataaaagcttacaggtctgtcagaggagattttaaaagggatttcatgggaagtcttttttttttttttttgagatggactctcactctgtcacccagactggcgtgcagtggtgcagtctcagctcactgcaacctccgcctcccaggttcaagcaattctcctgcctccgcctcccaggttcaagcaattctcctgcctcagcctcccaggtagctgggacgacaggcctgtgccaccatgcccggctaatttttgtatttttagtagacatggggtttcactatatattggctaggctggttttgaactcttgacctcaagtgatccacccacctcagcctcccaaagagctgggattataggcgtgagccatcgcgcccggcccggaaagtctttaatgagaagcactagcttccagacaaaatttcatgagatagtatagtttgttcaactcaaacccaggatctttaatgtccgagcaaccactttgctatcaaagttggagttaattgcattaaaaggagttatcagatcaatattctactgttgttgaatcatctgagtaaagaaatactgtctctttttaaatttattttgaggtaatctcaaatttatttaaaaaactagaagacttaatgcagttggaaaaatagtacagagaatttctgtatagacttgacttagattgaccaatttttaacattttgccacttttgctttattattctctctatatatgtaaatttatatgtctaaccatatattctgaaccatttaagaacaagttgcatgcatcatacccctttacttgttaatacttcagaatatatttcctaggaagaagactattctgttgtataactctagtattgttaactaatttcaggagatttaacactgacataatactttaatctacagtgcatattttgacaattgtctcaataaggttccttccagctttttttctctctagtccagtaatctagaacaggatcacatattacattgtaatgtctctttttagttttctgtgatctggaacagtttcccagttttgtctttcttgacaatgatattgattgaagaatataggtcttatttaatagaatattcctcaacttagatttgattaatattttctcatggttagattcaggttatgcatccctggctggaatactacataaatgatggtttgttgatttgttctttttgggggtattgcaagggaccaagtaatgtaaggcttcataaagagtttggagtttgttaaacgtaatgcagagtcattagagagtcttaaaaactaaagtatattttagaaatgtcactctggcagctacagaaaggcaaggtgggcagacgcagaccagacaagagactattttgtagttccggtacagtaaggtatttgtaaggtaacttagaggtaataaagtaataaggtaacttagatttggatgacagtaatgaagctgatgagacagattcaacagtgctttataaaattaacttatattactattatgagtaatttatactttattccaactgcattagcatacatttgaaaaagtaatagcagcaaaataataagacattattccatgttaggggcagtgcttattgggcacatggatttgcagttccttttcaacaatttcttagttcccaggagattgcatacccttagtacgtttatctcaaactacaacagatgctcttatccagtatgttatactgcttatgatttcaacaagcagttcagtcaggaaatgttttgtgaacacctgctgctagacatggatctatgctctgatacagtggtgaaacaagtgcatttacaaataaataatataattttagctagcgaaggataaatgtaaatcagtgaagcgtggtaaggaatggagagtaagggaggagggaggcacgtgattcttaagcagtccttgagcagaatgatatctgaatgatgaaagtgaaatgtgagatgatgagaggcagtagcaaaaatagaggcatcaagaaaggtacaagcttagagaatcaggactagcaagaagacatagtctgcctggctcatgagctaagggcaggacatgaggcagtttaatgtgttagaggcatgaatttactatgaaaagattctagattctgcgggttatttttcccataggtaatgtaatctttatgtagactcccagttgttgtactgttttattaaatgttaggtatatacaacgttctgtaagtatagctttgtgttctggaaaaggtaaacagtctttcttcagttaaatttatttaataccttttgctctaagtatattcacaaaactttagatgtagtcttttaaacaataatacaaagtaattattttgttaactgttaagaattttagtaaggaaaaaattttgaggctgaaacatctgatagtggtataatgaaagcttgttctttaaaaaaacttaaaacactgtttttgtttggcagtctcaagttaggctttccgtaaaaagtttaccaaggtaaaattctttgagtctcaatattcgagactaaaacaaattaagcagagtagatgaaacttaagttagcataaaaggtaagcagattggcagttatatgtaatagatagaaacaaaagtattccattcagcattaagtgctgatcgaatacaggtaaggagaaaacagtaactataaggaatcaaagtgctgacatttaaggagacaaatgtatgaaaattttcctgaaggcaagacatgttagaattgtgaaaatgctttgttctgtaaggaaaaggatgtatgaaagtggggaggaaatcttttcttaatgtaatattatgttatgggagatttgtgtccgtaacaatttgacaggttgaagattaattctatgtggaagtgttgagtcttcgaagatagtatgtaagaattggacaccacagcctgcgttcagcctttcatcgatctcaggaactcttcttcattttctcctactttcagttctcttcctagatttctaacatcctgactaactcaattttcagctgacttttttccagcctaattaaattttgatgtttcttactgatcattttcagatgaactctgccacagctttctattgattgcagaactactttatgatctagttctctagttataacaaaactaactcatgtagtgattgtctattttcagtcatttttccttttttcttctttactaatctttctgaaaataatatttctgaagtatattatgcttatgtatgcaatattactacatggtaaaacagtaaatttgagattatgtactttctaaaataaacgggctaactagatttttacttagtatttaaatgtgatataatttggtagctttttaaaaaattaagatacaatacacatactgtggcactcacttttaagaagttgtttcatgttcattttaatatacacgtgctaccttactacaattgacagatttttagaaaatcttcaaggattcaggaatttgtgagctgctgtgcgttgttggcatttacagaaattattagatatttagttttaaaggtttagaaatctgggaacattaactggacctcttgagctactttagcgctgttagtgatgtatacctaggatatttgacaattaacactagagtcagtagatgctagagattgtttataatcacctttttgtgttttgagaattagtgtcattaccatcgtgttctacttctgaatgaagtcaggtgactgcagtcattgtctgcatttacattgtgacatctttttttttttttcttttttttgagacggagtctcgctctgtcaccaggctggagtgcagtgacttgatctcgactcactgcaacctctgcctccggggttcaagcgattcttctgcctcagcctcccgagtagctgggactacaggcacatgccaccatgcccagctaattgttttatttttagtagagacggggtttcaccgtctaggccaggatggtcttgatctcttgacctcatgatccacctaccgtggcctcccaaagtgctgagattacaggcgtgagccaccgcacccagcatatgtgacgtacatcttaaaaatattgtttggtaggctttgagtatagaatatacatgcttatgatcataatgtgtttttagcatttcagcaggaacttgatgcaaggcatgacaaatatgagagacttgtgaaacttagtcgggatataactgttgaaagtaaaaggacaatttttctcctccataggattacaaggtgagtaagcatctttagaatttattacagtttgatactagctattagaatattctgtgactttgtgaggattagaagacatcagcagtaggtacaacttaagagttaatattttaataaaaataggtctcagctgggtgtggtggcgcatgcctgtaatctcagcactttgggaggccaaggcgggcagatcacttgagctcaggaggtcgagaccagcctgggcaacatggtgaaaccctgtctctactaaaaatacaaaaattaggtgggattggtggtgcatgcctatcatcccggctacttgggaggctgaggtgggaggcttgcttgagcctgggaggcagaggctgcagtgtgccaagatcccaccaccgcactctagcctgggcgactaagccagaccctgtctcaaaaaaaaaaaaaaaaaaggaaaagtctgtaggggttgggtggacttaagaaagaaaaattcagagcagctagggattttgtgttaagattattcattaagatatagctattgtctgtgaaaatatatgatatattttgattgttagagcctgttacattaaactttatttggatgatatgcgtgaaaattttaatattagataaatgttaaaatctgcataacctattttctcgttcatttttgaactcatggcagtctggctttctgcctcacaattattgaaatgcccttgttaccttcatattattaagtctctgttttcttattttacatttttgtagcatatgatactgttgactacttaattctttttcgaaagttcctgtttcagttttgtgacttttgtttacatttttttctctaggactttactattttatttttctacgcaggctttgtatatttgatagacttcgtgattgcaagtaaaagaaactaacttaaactagtctaagcagaacggggaaattaattataaaaaaagccactatcaactagcagatttcttattttatgcactattttctattacagttgtaatcatattattcatacagttttgactagtaaactgagaaaatagcagacttcagaaaaattagaacttcccaagattcagcactatcttatgagcagctgaggatctccatcttccatctttgcttctttgtttgcttcataattcatttgacctgattcctttgcctgtttcacgagaggtagaatagtatctaccctacaactccccagcttacgtgttttagtccagcttctgaagacggattgttgttacaaattccagatgtctccagaagggtagctgtgattggttttatactatatgtcacagaaagaatgtagggaagatcacatataatttattagcttttcgttattgaagatattattgcccgggcatggtggctcacacctgtatgggcaacatggcaaaaccccatctctacaaaaaatacaaaaaactagctggagatggtggtatgcaagtgtagtcccagctgctcaggagactgaggcaggaggattgattgagcccaggtggtcaaggctgcagtgagccatgattgtgccactgtaccccagcctgggcgacagaatgagaccctgtctcaaaaaaaaaaaaaaaaaagatactgaagtattccgttcagtaacatgaaacttttaagataattctcacattttaatttttacttcattaaatggaatctaatttgccatacatagatttattgaaatatggcactgttaacattttctttttcttacctgactgtgtaaaattagtttttgcttgttttctcatatcattcttagatagcttgtacataataaggcttgtattatcgaaagaagcaatactgttcttattaattatggacacttttttttagtacttattacaattctaaaacaattgccatcagtattcagcagtaatataaataacaaaagcaataatataaagaaaaacatacagattgagtatcctaaatgcttgggactggaagtgttttggatttcggattttggaatacttgcagataatgtatgggttgagcatcccttatctggaaatctgaaatctgaagtgctcttgtgagcatttccttagagtgtcttgttgctaagaaagttttggattttggagcattttggatttcggattttcagattagggatgctcaacctgtaataggaatatgacaggagaccttaatattttagaaaaatctgcgttactgtgtgaagtcatcttttaaatatttttccaccaaaaaataaatgctcattatagtaaacttagaaaatggtagtctttagaaaaattacgaatggcagaaaggtaaagctacttaatgagacaaatcagtctgtagtacccaaagatagcctctatcaactagcagatttcttattttgtgcactgttttttatcatagttgtgatcatactgttcatacagttttgactagtaaactgagaaaataatagacttcagaaaaataagaaacttaagaaaaaaatagaaactttagaaatattagaaacttcaggaaagtaaagatacttcatgaaagaggctggatgtggaggctcatgcctgtaatcccagcactttgggaggccaaggcaggcagatcacttgaggtcaggagtttgagaccagcctggccaacatggcgaaaccctgtctctactgaaaatataaaaattagccgggcttggtggcatcccagctactcgggaggctgaggcaggagaattgcttgaactcaggaagcggaggttgcttgaactcagaattgtgccactgcaatccagcctgggtgacagaataggactctgtctcaaaaaaaaaaaaaaaaaaaaaaaaactttatgaaagaaatgagccagtcacagtacagctgaaaaactgttgtgagaggacctcatgtattttaactacaaaattattttaatagacatagataactcttcttcagtgagcttcagtagtttgtgtctttcaaggaatttgccatttcctctaagttttgaaatttattggtgctaattttcattttgatttcacctttgacccaagaataatttaagtatgttattttgtgtccaaatattttgggagttttccagacgactttctgatactgatttctaatttaatttcatgtggtcagagaacatactttctataatttgaatccttttaaatttatggagccttaattttggcccaggatatggtctatctggtaaatgttgtgtgtgcacttgaagagtgtgtattctgttattgttaggtgtaattaagtcagattggctgatagtggtgttcgcgtcacttatttccttatgattttctgtacactcgctctatcagttattaagagagaaagagggtgacctctcttgacgataattgtagatttgactttctccttgaagtcctatcagttttttcttcaagtatcttgaagctcttttatttggtacattaatatttaggattgttatgcatttaatgaattgaccctttatcattatgatggtatccctggatataggctttgcccaaagtttgatgttaatatagctactcctgtttcgtttgattgttattagaacgtatatcttttcatccttttatttttaatctatttgtgtttatatttaacatggatttcttgtctctcttgctttttaaaaatccattctgaaaatctctgcttgttagtgcaggtgtttagaccgtttacatttaatgcagttattgctatggttataattaaatctaccatctattcttctctccttcctgccttattttggataattttttatgatcccattttatcttatttgtaggcttattagctatgccttttttgttttgtttttgtagtgattgttttatggttcataatatatatcttattgtcaactattctcactttgtacaatactgtgtttactaaaatttgtgcatacaagaatcttttcactttgcatgattttttggtaacagttactttgccagtgaaggtcacagttttgatgtgcccaagtttcagttaacacagtaccatgcaaagtaaggactacttatcatttcgcgtatggtataaaaatcttatacttccttttccatttcccctctactagcttggccttttgtgctactgttgtgattcatgttatttctacttttgttgtttccacaatatgttatgatttttactttaaacagtatgatttaaaaataagaaaaatatttatccacatttaccaatttttgtaaatgttcattcctttgtgtatagattcagatttttatctggtatcattttccttttgcctaaagaacttcttttaatattttttgtagtgtcaatctgctgatgataaatcaattctttccggctctgtgaactaaggggattgttctgcctgctcactttgggcaattctttttccagccttaggtagtttcctcacatgcctgcactgatcagtactcaactgaagacttgaggaggttgcttctataaatctctgaagctctctgtttatacagctttctcctcattgttactctgctctgcaaattttagctgtctcgatcccccaaaactcccaactccttttctactcaggctgactcccaggctccacctaagtttcctgtctctgtactgtcacttggaagctttccaggcaataagatggggcagtcagagggtatatgttgttctcctccctttccccagggatcactgctccatgctgcctgtagtccagtgtctgtaaccattgttttctgtatttattttttctttttagttgtttaaggagggaggataaatccagtccacgttactctgcccttactgaaagcagacatttatccatatatcatatttttatgaacaaaatttttcttatagtaaacatacaatttttgtatacttttttcacttaacagtgtgttaataacattttcatgttctccatactatgaatagttttgagtagttttgagttagaagtatatgaatgcatacaatatttagccctatgttgataattaggttattttagtttttcactgttaaagcatctgatgttctaaaagttcccaatatcttgatcatagtgctcctgatatggaagatatattgactgaatcagaaattaaattggatggtgtcagacaaaagatattccaggtagcccaagagctatcaggggaagatatgcatcagttccatcgagccattactacaggtaagtctaggtttgtttcagggtaatatatattttaaatggtgtgctacatgattaacatgtgagttgcatgaattttaagtgacacctgatgaaataataatactggcttttaaagaactgcaactttgtagtaatatagaagtaatccaaaggcaagttggctttatgttttttttaacagtgtagtgatggtcattgattgattttaataaagtatttgagaacacagatttaataggatgaactttattcttgagtatgtaggatgtgttcagacagggcacatctcagtggtggctcacgcctgtaatcccagcactttggaaggccgaggcgggtggatcaccaggtcaggagttcgagaccagcctggccaagatggtgaaaccccgactcaactaaaaaatacaaaacttagccaggtgcgttggcgggcgcctgtaatcccagctactccggaggctgaggcaggagaatcacttgaacccgggaggtggaggttgcagtgagccgagatcgcaccactgcactccagcctgggcgtcagcacaagactccgtctcaaaaaaaaaaaattttgagggtatactggatcttggtggttatcattattttcaaataaattgaataaatgtataaagtgcttggttctttcctctttcttctttttctaatgtgggttcattgataggacagatactagataattcagatacaggttcagtatcccttatccaaaatgcttgggaacagaagtgtttcagattttgagtgttgaaatattcacagtttactgcttgagcatctctaatccaggaacctgaaatgctccaatgagcatttcttttaagcatgacctttgagcatcgtgtcagcactcaaaacgttttggattttggaccatttcggatttaggatttttggattaggaatgctcaatatcagtaccctaagatttgcaggaagactgggaaatgagtttatttggtatctgcttaatacgaatacccagttttagcctaaacgtttataatttcagcacttgttttttcagaaatgttgatatgtcttctaatatgggtaagagaaagtaccagcatacattagttaaaactgagggtgcattgttggaaactgaagtgtaaaacagttctgtgaggagtcattataacatattaccaaatgaaatacagtctgccatcataatttattaatatcaggggtttatttgatttcttaataatagcacacacaataaagatgacttcatgaatttagtttgttgtaaagtggcacaacctgtaaagtgtgacagatttggctggagtgggagacaggatcagaagtactggtgggaagaagggtgaagtaaaaggtaaatcaagcttggcagaaaacatgagaatatctttataatagtagctgtgaccatactacagatagattcatagcaggaaaatatttcagacagagtagtcctgctatacataagttaggtatgcgtgtgtaatcttgagggctactgggtggtagtgttggtggtggtgggggaccaagttaggtctcttagtttctggaaagtgcttgaactgaagcagcagtacagtctaaatgtctgtattaaacagaaatccaattctacagcttttcctaagtatcctattaacctgaatgactaaaggcaagagtttgaataacttccataatctttatcattttttctatcacatcatcatgtagtatgcctatcttgcaaaaattcatgacagttaataaatgtaataaaagctgatcacagtagttctcactttggacttcagtctgcttaaaacttgtattttaataaaaattcacatattttccccaaaatgttggtgcctcatgtgtgaaaaagtttttcatgtttagacttctcaattccttattagtgcatgattaggctctactaattgtgacaacatcaagttccccaaatatctgtgggacatatgggacatttcagatttgctgtatttggcccagtagttctattttgtatgtcctcatgcatcagtgaagtataaagataaagagtttaaataagggccaaggccatatagataatgataccaaaagcaacctagaaagctgtacattgtcttacagaacagagaaatggagagaaaaaggtgaaagggaaatattcagtagattatttcctaatgcaggaaggaagtgctgtactcttggaaagataggacattaagaaaatgggaatgatagatcttcagattttcctacttcactgtatcattgaggattattataagcacagtggtctcttttaggccttcgtttatgatttgtaagtttcctttgaagataacttactcatggattaaaataatgaaggattttctgtatcttttctgtaaaaagtctttaaaatgagattctttgaattgaagcaataaagatgttttttcttaaagttaaggaataaagcagtcaagtaaagaggtgtctaggaccgaaaattttgctgacagatattttatttgataaaataaggttatttataattggattagcattaacaatatgatgcttatgaatagcttgctgcttgtaattgttaaatgcttgttttggtattactccaaatagttgttcttttgacttgaagataaaacaattctggcaatgaactaaaggagttctgtgcttttcctcattaagaatagtgctaatggcacgcagagcatttccctaagggatacttgtgtgagctcaaacattgagtatcctaataattgaacaacaacaaaacgtcaggtctgttttctacacatttcttatcagagtagattacagattgtcccaagggatggttaaacaaatgaacaaataattagctgcttgaaataagtctttaaaaaaaaatttgtgtcctgtcattttttttttccctcttgttgaaaaattaacagtttgggggaaatgtcctccatttcaaagaagaaatacatgtttttttcttaagtttagtttatatcactgataatgataagaattgtcattttttgagacatttcggtacacaaaactaagtttatatcctaattaatgttttaattcttttatccaagaatgtgaatgatgggtaaagtggatgttttgggccagttaagatatgtttttagccactattctttatattcacaatctcataggtttttgcaatacctctaaatcatagatatttttaccacttcacaggcggggagattgaggctcacaagttatgctcagggtcataagctagcacgtggtaccattggtttcttcccacatggatttcatttacctcttaactttacaacctaactcctagcaaaggctttattttgcttaccccaaatactgaggttttcctcataaacccagcacacactgtggcccttttttcatagcacttctcaacttctaatgtgtaatctctttatatattatatttcttcattatctctctttcccttactagaatgtagactctatagatctctacaaagatttcattcctgtttttcactttatatatcccagacacctaataagtctcccgaaatacaaatgttgaaaagaatgaagaacaaaactaattttaaaaggctttttgttgttgttcagccatatgctttatctgatgatttgctttcacaagtttatattttactgttttttgtttcttccgaaagaaagcaagtttccaggagctatttcttagacatactagcaggaataggatcaatattaatgtttagggaagttccaaagctactatagcagtacagagaaattcgatgtaggttcagcatattggcaaaattgtgagtgcccactggaaaaatgaactatgatgtgaatctctgtaagcttttggagtaacagtaggaagagtgtagtggatggaataatatagctaaaaattgaatttatctgttaatgagtgagattaagagagaagtaccagagatgttggttagttaaggtaaagctaagtgcagaaacagattaataaactgtgacgttgcagtgacttaacaaactagaaatcgttatctttctctcttgaagaccaggctttgtagtggtagtttgagtgtgctctgcccacttagttattcacagatccatgctctctggggctctgctgttaccagtacatgatttccaagatgagccagggcatcaacatagagctgacagattgtggaaaagggaggagtgggggatggcgcctgaggattttatgcaccagccctggaagtggcatggagcacttctgcccacattttgttggctagtcacatggccacaccagccttaaggaagaatgggaaatacggtctctgtgcgtgccaaggaaagcaaaatatgtttgatgaatagttaatttttctctgcctgatatggtaatttgatgttcttttggtgtaatagaaaattcaggtatatgtctgttgattgatttaacatttttttctgaatagatttttcttttgtttgaaagcattcatttgtctgtttgaaagtgattttataactggtgagaagacttttagttctactacctaattttgtaaatgaggtgagtgatagtattggaattggaatccgacttgtttcatctactctgatagactttctgctagactattatccatctctgatagctagtatctagtgctttaaactgttttatctaaagctaaaggctttttcttttttttttctttttttttttttttttttgagatggagtctcactctgtcgcccaggctggagtgcagtggcgtgatctcggctcactgcaagctccgcctcctgggttcacgccattctcctgcctcagcttcccgagtagctgggactataggcaaatgccaccatgcccagctaatttttgtatttttagtagaggtggggtttcactatgttgaccaggctggtctcaaactcctgacctcaactgatccacccacattggcctcccaaagtgctgggattacaggcctgagccaccgtgcccagccaatttgctgttacttcttagcaaaccaaaaagtatttgagaattgtagtacatattgacttaggataacattttagaagaataacagcccctttcaattgtaagctaataaaagggaaaagaaatccaaggaacaaaaaaccattgctttctttttttttttttttttttgagacagtctcactttgtcgcccaggctggagtgcagtggcacgatcttggctcgctgcaagctccgcctcccaggttcatgccattctcctgcctcagcttcccgagtagctgggactacaggcgtccgctaccacgcccggctaattttttgtatttttagtagagacagggtttcaccatgttagccaggatggtcttgatctccgtgatccgcccgccttggcctcccaaagtgctgggattacaggcatgagccaccgcgcctggccaccattgctttctttaaagacattataaaatattgtctaacaaaaattaatggcagtaattcttattttattcttctcatagtttaatttagtaaacagatacaaagggcccttataccagacactgataacattattctgtataaaccctactatgtaaacagatgcctgcactttacagatgagaaaattggagcacagtaaaatgagtaaacttaactcagttcacactgcttgcaagagacttagctttagaacctaggacatcctcccttcaagtctctgctttctgttttgccattatcatattttattcagtgggaagctagaggcagagaggtgaggcagttgtagtggtccttcttggagtgaaatgaatagggcctcaagtttggtgttagcagtgggaatagagaggaatgggcatgtttttagaagacagtttatttttaaaaagcagaaagggaatagtctagggatgcctttaggtttctggtttggccaactggatgaataggaatgttatttgttaagaggagaaaacaggaaggtggaatgggttttggaaaaattaattggaaatcttaggacgtacaggttgctgcctaggaggcaatttgatacgtaggtctacagaactcaggatgcatctgcagttacagccttggagtcatgagcttataaattgtagttaattttaaagacatggataagattgtctaaggagagtgtagagtgagaataaaaccaaaggctgggaaccttaactaaaggaaatacaatataatatttaagcgaataatatccctgaataatcaagacctgaggatgggatccagagcttaagccttgtatgacaggacagctccctcttcccagatgggcagttacagatgggtagttacagatgggtatagaggtagggaattgagaaaattcttgctcagtcacttccattttcctgtcatgtgctgagaaaaggggatgtggtggggaaatggtatggaattgatgggagactggagatttaagaatgactctgatggctcacgcctgtaatcccagcactttgggaggctgaggtgggcggatcacaaggtcaggagttcgagaccagcctgaccaaagtgatgaaaccccatgtctattaaaaatacaaaaattagctggacatggtggcgtgcacctgaggcaggagaattgcttgaacccaggaggcggaggttgcaatgagccgagattgcaccactgcactccagcttgggagacagagtgagactccgtccccgcccccagcccaaaaataaaaataaaagaatgaatgtgagtgtaatggggatgggaacttaaccaggaatatttaatagttgctgttaatcatttttgaaagtttacctgagcaataaatataatcctttctgtatagcaataggaatgaatgaggcagaaagttagattaattcatggtttgggtcgtgctcattatttggcagtaggatgacagtgggagaagtaggaaaagataagcagcctgctgcattattgtggccatgtttgttgttaaaatagaaatacatccttctttgtttgttggtaagtagtatattgtcaactgtgatgagtagtaaaattaataatacaaatttcagcacatgtggtttatctcagaagccaaaggtgcaccgattccaagatactatattagtttactaggcctgtcataataaaataccacagactgggtggcttaaacagaaatttattgtcttgcagttctggaggcctcaagtctgagatcgaggtgttggcaaatttgatgtcccctgaggcctctttccatgacatgcagatggctatcttttccctgggtcttcacatggccttgtgcacacgtgcacacacatctctgttgtccctgtgtgtcctaatatttccttatgtcaccagtcatattcgataaaagtacacctcaatggactaattttaacttaatcccctctttaaagaccttgtctgcaaatacactcacattctcaggtactagaggttagggcttcaacatataatcagcatatttggggcagcccagttcagtccataacagatactttttggtttgtgcactgcagctagaggatgagctacaaatgttactttggagtggagggactggggagttgcttttaagtccaggggtgggtgggggtgttgtgttgtgcagctgagctgtggacttcttttgtaaacccccaaaaagaggtgccttaaggggagaagcaaatagtgtctgatgactctactgggaaccagggatataaacagatatttcatgcagagcatattctctcaggctgcgtttataatctcaggtaggttcaggaagcattgctttatttgaggcatggccccctggtggaaagagaagtggctgtctctgcacataagggaaagagtctgggggaagggagccttattgataaccatcacaggacagcaggcatcccagcaagtgagaacacagattttctttcttttcttcttccttccttccttttcctcttctactcctttcgtcccctattggttggaggagagagtatgatgagagaggaacagagactaaaggaatggttgggggaattggaagctgacaatgggggcaagcctgtgtgaatcccctacattggcaggaacccagttgcctgataactgtcattttaatggaggaggtcataggaagagtttgatgatactttgcatatcaaatcatggctcagacaagggaagtcaaaagccctttccaacagcatctaaaaaattaagaaatgatttgagaattattggaatgatttgaggaataatttgttatattttatatcacttggtaagcagttctataatatagtttagtgtattaagaaaataaaaatatatttaaaatttgggatttatatttatttatatagtactttatattcctgttaaaatatcttgaatatgactccaagggacaaggtagttgaaagtgcagatgagttatttaagtggctattataaggattaagcaagataagaagagaatgtggtcctttggtattaggaaagtcagttttagaagatccccagattggtcttaacttttctagtctgtgaggtctccttgtaagaggtaaggcttgctcagtgaggtgaagtagaaagagatcaactttgccatcagacctgggcttttatgttttaatattccatatcgctgtaaccttggaacaaagtgtacaacctatttgaatttcagctttctttcctttagcatgagaacattaatagctacctcctggattttttggaaattaaatacatttatggaaagcatttattttgtttggcatataaccattaacaaatgttcattcctgacctttcttgaatttagcaaaattaatctataatattgtactaaattttaacatttattttcattttggataaaaactcagtggtaccaatttgctcaatactcgttcttcagtgctgatgtaaaaaccctgcctagggctggaagtggtagctcatacctgtaatcccagcactttgggaggtcatggtgggaggatcacttgagaccagtctgtgcaacttagcaaaaccctgtctctacaaaaaagtaaaaaaaaaaaaaaaaaagtaaataaataaaaataaaaacaccattagctaggcatagttgcttgctcctgtagtcctagttactggggaggctaaggcatgaggatcgcttgagccaaggagtttgaggctgcagtgagccacgattgtgccactgcactccagcctgtgtgacagagcaagatcatgtctctttttaaaaaaagaaagacccattccaggcgcggtggcttacgcctgtaatctcagcactttgggaggccaaggtgggcgaatcacctgaggtcgggagttcgagaccagcctagacaacatgatgaaaccccgtctacaaaagttagctgggtgcgacagcaggcacttacaatcccagctactcgggaggctgaggcaggagagagaatcacttgaacccaggtggcagaggttgcagtgagccaagatcgtgccactgtactccatcctgggcaacagagccaggttgtctcagaaaaaaaaccaaaacaaacaaaaaaaccctactcagacaaaatccaaattagtggaattctatttagagtttactgttggtagtataagcacacatactttacaaagctgaggcatatagatatatttattttcagtgtgcacttcatgtatttgaaagtagatttttagcagagtggcctgtgaatccaatataaatctgatttcattttaacatttcagtgattgatttggtgacgctaacttgttttaaaaattcatgtggtaccagagaaatagttacaagtgcagtttttaaaaattgagacattacataccacataattaaattttaaattgaataattcatttgtttttactgtttccacaaggttatgtacttatcactgtctaataccagaacatttcatcacgctcaaaagaaacctcctacctattagcggtcattccccattccccgttctcctaataccagggttagcccctggtcaccactaatctacttttgtctctatggtaatttgtctattctggatatctcatataaattgaatcaaaccatgtatggcctcttgcgtctggtttcttagagcatgttttcagagttcagctatgtcatagcatgtatctgtatttcattcctttttaatagctgaattatagtctgttttatggatatactgtattttgttaatctatcatcagttggtggacttttgggttgtttatactttttggcctttgtgaataataactgctgttaatatttgcctacaagtctttgtgtgaatatatgctttcagctcttttgggtgtatatacctaggagcggaattaccgaatcatatgttaaacaatttctgaaaaagcattaaaaaccaagaaacaaagttgagtcatgtgaggttcaaatttataatgaaacctttgtcatatctgtttgcttttatatatagtttttgatggagatttggactggatgtatattgcttaaatattaaaggaatatgtaaaaataatcagaagcctttaactgggtttccctgttatatgttctaatgggagaacaaggaaaaaaataacaatttacataaaagcaacctacagacttctctcttactggcagctgattctgtaaataattctaattggatttcatccaaggctaagacagaaggggaaggcattgtttgatggaatatggcagtacgttgaaaattttcaccttggggattattcactgaaaatagcggatgtcctttttatcaggttgaaacataacttgtttaaacatcctcttacctacatgtgaccaaaaatgcttttcagtgttttgggccagatgtccttgaactttctccacattatagcatgaaacctaatttctttctttcctttttttttttttttttctttgagatggagttttgctcttgttgcccagggtggagtgcaatggcgagatctcggctcaccacaacctctgcctcccaggttcaagcgattcttttgcctcagcctcccgagtagctgggattacaggcatgtgccaccacacccggctaattttgtatttttagtagagacgaggtttctccatgttggtcaggctggtctcgaactcccaacctcaggtgatccacccactttggcctcccaaagtgctgggattacaggcgtgagccaccacgcctggcccatgaaatctaatttctatggagcaaaaatggccacctcatctctgaagtaacttttgttaacacatttcaaggacaacttatataatgactagatatacttgaaaattaaataactgacactcacccatatttaatagagattgacaccaaagataaattttgaggactcttattccatattctctcttttccctattaaaaaataaatcaggacctcaaattctgcccttcatcagtttgaacactaaccttgttagaaagtattttaacttaagtacaactagatagttctgaataattgaataccaaattttaaaatattttttttgttgaggcacttagtttcatagaccttggtgaggagaaacagattattagaaggaatttacgggaaaaagttgagtctcttgtacatatgagttgctatctttgggagagggccaaggagcaaagtcgtctgggcattgtccccaccctcagagttctagggtgcaaaataggtgatcagacagctgtttgtaatctaaaactgactgaaacatttaattgaagtacaagttttatatagtgagaatgaagagacgagtgccgccttgattggggtgtattaaaacatttaaactattgttgtaggtagagaaagatgtgagagaaggcttcatagtcacagaatgacatggaatcatgaaagtatatagtgtgtttggaagactacagaataaggttaagcaaaacatggagaaaagctgaaccaggaatttagtgtggaaaaatgttgagaaaaatgggtatgttttatatggagatgactgtcaagaagcaggtaagatgggaagggtgtgagcttttgaattctagaaactttcactatttactgtgtgacttggctgaatttcttaacttctctatgcctcaatttgttcattaaggatagtaatagtcacataaggttatagtgagcattaaaaagatggatgtaaagttccagatccatactcttaacatgtagtagacattcaagacttagtaaactattattttatttttaaaaagtttgttgagggcttctgggtgatacccctaaataattgaaagcacgacttgaacaggtatgaatagtcatgtttacagcagcattacttagaaaagccaaaaggtggaagtgactcagttgtctctctatagatgagtgaataaacaaagtgtggtatatgcatacaatagaatattattcagccttaaacaggaaattctgacatatgttacaacgtggatgaagcttgaagacattatgcaaagtgaaataagccaatcacaaaagggcaaatactgtatttgttacttacatgaggtacccagagtagtcaaaatcatagagacaagaaagtagaatggtggttggcaggagctgaggggaggagggatggggagttagattaagaaatgctaggtccagagtttcattttggaaagattaatacaagaattctgtagatgaatggtaataatggttgtacaacattatgaatgtatttaatatgctaaactgtacacttaaaaatggctaagctggtaaatgttatgtttgttttaccacaattaaacggagaaaaaataaaaatgaaactgctaatttttaaaaaaatcaaacgaattctaaccacttcagctctttaagcaagatgccataattcattttgttgggagtaaatattgcttactgtattgcagtatttggcttacagagatgattggagtaaaagcacatcttaagagtttgctcctgctcaaggaaagactgaaattcctgttttcctaggtcctctgtgataattaaggattttgtcccagggtagatgtccatttgtagaatagagtccttaaggagtttttggacatgcaagagtagaaatggagctaagttgaggggaggaaccaaagagccttggataatgaaagatgaataattttaaatttcatagttgcacaatggaagaggggaaagaaaagcaatagacaatcaaaaagcaaagtactatttttaaaactactcctgcttctgaatgaatgttattgaacaaagatgacaattacggagacaatgatatggtaaaatatcatgcatttgtccatggaagaaaaaagtttgttcaccttcattagttgtaaaaagttgttttgtccgtgagtcaattcaaaacatggaaaatggttttagtgaatttatttttaaaaataatttgtaattagtaaaatcaactaggtacaactaaatgccaggcctgggcctcagttgtaaaagtactagatgccatgatcttgatggtacttttaaaatttggaatattttgaactattcttccactgaaatatgaaaaaaaaagtacttgaatgaaactaaactatatggcagccaaacagaaatgctatttgtttctgcaacaaggcactgctgaatgatacagaatattagtagtatgttgttgctaaagtgtttgtggtcttatcaacagctacatatgaaataatactaaatttaacaaataggatcgacagtgttacattgggcgagatggagagaataacagccccctttccatgtaaggctgcttatcctgtttgttgaatttaatattattcaaggctcaggaaaatatgtgtgtattgccttcaactgacatagttctactttttatactgtctccctacctacctattgccatgtataagacaggcaccttgccagttgtgtttgattctgaccatttaaagcagtgctattttttgctcaacatgcatacagatatatgtttatgtacccatcttggaaatgcaagcctttgtgagttatgacttaactatagcatgaattgaggctgataatgtaagtgggggtgaaattaagcatggtcttataagccacgttaatggttttgccctgtattctgagcgccatgggaagctatttgggctttaaactggggaatgatgtcgttaacatattaaaaaggcagacagtctgcagtgtgagaatggatgtgaagaggtcaagaatagatggggggagaccaggacatgcttagaattggcaaaacttgagagaaccaggtttggaaggaaggtagtgagttcattgttggaagtgttgattttgaggtatctttggtaaggatgtcagatactcatttggatgtgagtgcctgttggccagagatgtgaagtttaagggcagcaaggttacttgaaaccaagtatagatgaactggagggaacctaggactgatagaggcagagacttaagaagacatgactagagaggtggaaaagtgggaaatcaggagatgatgctgtcaaaggaatcaaaggaaaacttgttcaaagaggggaagtggcacaaaatgctgaatgctgccgagatgaagacggaaagaatgtccattagtcttatttattatggtaatcttagcaagaactattttgttttagagatgtacccaagctagattgaagtaggttgagaagtgtgagatgaagttattgaggaaatgatgtagccagctacttcaagaaacttagctctgaggaggaggagacagatggagcaatagttgagaggaaatatagggttcatggataggacagatctgagtgtgtttcagtatttctgtaagattcagtatagaacataaagtgagaacacctagtatgttaaagggagaattcatgtgaagctcccagctggtactgaatcttgatcctgaacctaatacagtgactagccacagaaaatggaacaccttctctaggtagtagggctgaaggagaagtaataccattatttattttcctaattccttattgtattcatcaggctccaaacaggaaacagaaattagatggtaatatgaacagggaaagttaaatacaacatacagacttattaaccatataggggattataagagtaaaagagaactctaaagagtactggaatctcagatagagtgagcagccactacccctagggcggaggcagagcacccaaggaactaaatttggcagaacccaaccctcacccttcacaggatgaggtccagaccatgctggagagggtgggcatgtcccatcggctggcagagacatttgctgagctgttgtgctgatggactctctgggaagctgtccatggggaaatgccatggaaaggaattccctgcccaaggaggtggcttactgggaagccattctctggagtacaaaagaagctgtccccaggcaggtgctacatgctgttggccaccttgaagtgctggctgccccatactcagggctgtgaagaggggcacagcagaaccaggcagagagctctttacagttctttaagcacctagcaccctgtactgacaaagcttaatatattgccagctggcataggagacatgctttaagtatccacctccttcttctgaaataatggaactaagagacaaaaattgacaagtgatacagctattactggtcttttaactttaaaaaattttttttgctgtagtgacaaacatccttatatgtaaatctttgtgcatatcttcttgtttagctcataagaggctaaccacattagagcatggagatgtgattatgcatctttacgttttgctgtttgcttttgtgtgcatgaagtatctttagaaggaaatgagaaatagagattttctttgggggggaactgggcggtgtcacctattcataaaactaaaaattcataaaattaaacatttaattaaaaatatttttaattataaatataaatgacatcatctgttttgttaaacttaacctcgttaatgtttaatttctcagaacattatggtttgttaaattgtcccttctgacctatatttgggcatcatttgcagctcagaatgagtcaggatattttcatttagttaagtttcctcttagtgctatcaaaaccagggtcacccattttcccttgtatcctggacctttgcctggcatttgatgtgatgatactacagctgttagcctccccaacactgttgctgccataccagaagtgtagtggcaggtgggggagacttgtgagtagcaggactctgtcataaaaaatgttagagaacttaaatatcctcttaagttctgagttttctttgcataatcagaaatgtattctcttgctatttttacaacaaacctttaaaaagtttcttaaactaacaataataattaagaaatgctttttccctgtatcacctttcagattaagacatcaaataatattgaaaattgtggctatagaatatagtttgttgttgttgttgttgttgttgtttttgagatggaatcttgctctgttgcccaggctggagtgcagtggcacaatctcggctcattacaagccccacctcccgggttcacgccattctcctgcctcagcctccaaagtagctgggactacaggcacccgccaccatgcccagctaattttttgtgtttttagtagagacggggtttcaccatgttagccaggatggtctcgatctcctgacctcgtgacccgctggccttggcctcccaaagtgctgggattacaggtgtgagccaccggcgcccggccagaaagtagttgttttaaaacacttggaaaagtatagtactgtagacatgtaacaaaattgcacttgtgccctttacatttatataaacatttttaaaagtatttaagttacattttgatctttaccaaaatttactcttcaattcaagggttgtttctgtcttgtacaaaattgtattgcatagctctcttttttttttcttaaactaccaaagcagaaaggagttatctagtcttagatccattttgaactatgaaaagataaacggtattttgacacttacctacattagttaaaagtgattttgcctattaaaactttaagaaagatccaaattattattattattattattatttttttttttttgcgacgagtctcgctctgccgcctaggccgcagtgcagtggcatgatcttggctcactgcaagctctgcttcccgggttcacgccattctcctgcctcagcctcctgtgtagctgggactacaggcgcccgccaccacgcccggctaagtttttttatttttagtagaaatgtggtttcaccatgttagccaggatggtctggatctcctgacctcgtgatccacccgcctgggcctcccaaagtgctgggattacaggcgtgagccatcgtgaacggcccaaatgattcttaattttatgtctcatttgtttgaatcattgcttcgttacccagcaaaataaaacaaattaatttatataatttttattaaagcctatcaaaattatggaataggcttttcttttctcccccccccccctttttttttttttgagacgaagtctcgctcttgtcccccaggctggagtgcaatggtgcggtcttggctcactgcaaccttcggctcctgggttcaagcgattctcctgcctcagcctcccgagtagctgggattacgggctcctgccaccacacccggctaatattttttgtatttttagtagagatggggtttcgccatgttggccaggatggtctcaaactcctgacctcaggtgatccgcccacctcagcctcccaaagtgctgggattacaggcgtgagccaccgtgcccggccagaataagcttttcttaaatcctaattacttaaactcttaaaaaaattttttttctggctgggcacagtggcccagagattacaggcgcccgccaccatgtccagctaatttttgtatttttagtagagttggggttttactgtgttggccaggctggtctccatctcctgacctgaagtgatccacccgccttggccttttaaagtgctgggattacaggcgtgagccaccgcgcctggtccccaggccattctttctattctaagtgtctagtctagtactggcattgtagtaggcatccattaagcttttttttgaactagatgatgatcaatatgaagtttttttattatgacattcttactaattaagtgcttattcttagtaattttctttgtcacgctttcaggactacaggaatatgtggaagctgtctcttttcaacacttcatcaaaacacgatcattaattagtatggatgaaattaataaacaattgatatttacgactgaagacaatgggaaagaaaataaaactgtgagaatttaaaatttatttcacatttgttatataatttatgtaacagtatgacgattctagtagatttactggcttatgctaagattgagatgggaatgttctttctaaagtatggttttgtagagtctcaactaggaaatggtctttttaaatatttcagttagtggatagaacaagaacaactctgggcatattgggaaagtaatgctctttacctaaagcattatggagtgcttactgtaagtcctcttttggttttactctctatttttcacttgccctttgtaagcactgtcttatttaatccttttattaaccatatgtggtaagcattattactctcattttacagagaaagaaacagacttttagagaggttaagtaacttgccagaagccacaactaaaaagtgtggcagagctaagatttgaagttaggtattttgaatccaagcctgtgcccttgtccactctgccagcgcttctcacagtgtgctacagggatcccttgcatcaggtacctacctcaaagggttgttttaaaggatttgacttaaaggttattaattaggcaatatacagcagcacctgacacgtaatatacattatatacagcacctgacacggaagtgctcagtagtttgccattataaagtagtttttatatagtgagagctgttaatcatttactcaattcataatgcttatatctgaaatttatgtagcttttctgaattaagaaaaactttgcagtttgacttttaaacaaatactatttttttccttctgggtttcaagatataacaggcagtaaggtaagctgtattgactatttgatactttctgagataccagtacacttaaaattaaatattttaaaataatttatattatttaaataattgtttaaatattaaattattaaattattaatttaatttactaaatattaaatatttaattattttaaaaattttctttattttttcttttaaaaattatttttaaaaacaccatatattaaggataggtaggcaggagatggaagacactgtagaaataatattttcttgaatatcaactaaaatattaatacaaatgagactaatttggcatgacaggtataacttactttaaggaagccatgtattaactttaagttatatgaagtgtattaaggaggaaatttattttgagaagtaaaatttcttcatattttttattcatatagtgtagactgaattacacaaagaagtaaagtaggtctatttgaccctgcttctcacgtgatattagggaagttaccacactttcctttaaagttctctgtgtatcaaaatgaaaatattggggaaaaggccagaaaattgagagtcaaagtactgttttcaggacttaggtaccagattattttaagattatggggctataatattcatatacatgtttcaaattgtataagactatgttcataaataagttttagtgctaaagatgcttggtgctgaaatttctgggaatttgattgggaaaggtattttgctctgacttgcctgttgagaatattgtcaaaactatttaatttttattttaaaaagttttgtgaaaaatttcaaacatgcagaaaaatagaatggaaacattagtgccactaactagctatcatattcccatagctcaacgtcatattacctgtgatgtttctcggacctcatttctcatgctaaatgatgaggacgttgcaccaaatggtctctgcagagtccaaacagtgctaggattcaagtattagatacatagcaaagagtgatcttaataaagctgtctcccttgtctcagcttatatttatgtaacttcctttaaactttactcaaaagaattatctcattagttcctcaaatgcacaattcttacctgtatgcctttgtagttcccactacctaaaatgtcctttgatgtaactgcaacttcacctacccttttatacataccgtcttttaataacaatttaggcatcgtctctaccagaaagaattcagtagagggaaattgatgtggagagagatttcatgatgatatcatgatagcagctagcatttgttgaatatttactttgtgttgggcattatgccaagaacttggtaaatgttctcatttaacccttaaaataaacctctgaggtaggtactgttatcccattttacagatgaggaaactgaggtttagagagatgaaataacttgcccaagggcatacaccttatgaagcaaggtcctggaagaggtgggaggagatgggtcaaggtcatttggaagagttaacctcaaacaagaggagggacaactcatcatctgagactggaggatagaaggtaaagatgggtgtggatataaattttttttttttttttttttggtagggataaaggcagttgtgagaaattgtgctaggtaagctggcaaatgaccaggtcactgaaattgggcaaggttgtctactgaaagtgaagaggtttgggatttgagtagagccctgaggagagtggtgaaaggtttgaaattgtgtttgaagaggctggaaagagaaccatctaatgataagtaaaaggattggagagtaatttgtagcggtacagactctgcagttgtgattaccatttttttttaactcagtgagtggtactcagccacctgaataaaggactaatgagtatattttagtattgattgaggattctgtttttgctgggtaggtgcagtagaaaatatagcagtctaagggaattgaggatgcagtgagagaataataaattgtgatggtgagtgctgaatagggaaagacaagaagccagaaaaagactgagcttcttaggaaaacattaatggatcacaaacttggagggctgtatggtttttcatttaagaaagtaattgtcgtgcaataaagttattaagccttgttcaagaatatttttattttgtacatcaagtggagttggaaatagttggtttcataatgatatatttcaaaagtatcttgaagtcatctggttcatttcactacccagggcacacattcctcctgtaacatcccaagtggttattaagcaaaacagatttattttatttagaaaaaattagtatgactgatttgctattgattttgtacttctataataaatgtgatacatgctatattcactctttttcacagtgttctttcttgtgtgtgtgtgtgtgtgtttttgttttgttttgtttttttaccagccctcctctgatgcacaggataagcagtttggtacttggagactgagagtcacacctgtcgattaccttctgggagtggctgacttaactggagaattgatgcggatgtgtattaacagtgtggggaatggggacattgataccccctttgaagtgagccagtttttacgtcaggtttatgatgggttttcattcattggcaacactggaccttacgaggtttctaagaagctgtataccttgaaacaaagtttggccaaagtggagaatgcttgttatgccttgaaagtcagagggtcagaaattccaaaacatatgttggcagatgtgttttcagttaaaacagaaatgatagatcaagaagagggcatttcttagaatctaacgttactcagttactaattcttttgagaactcctaagagaccaatttgtaagacttatttagtatttcatttaactttattgtggcttttacatagaaacatattcagttgtacttgttttaaattgtatacaagctgtacataaaattagccaaatgaatcatttcttatatcttattcatgaaagtttgcatacagatgtttgcatatatgcctttttgaatttttgctggttaacctttatcatttatctttgtaatgtgaacatgcttcagagtgtaccttttgccataacctattttaatttactttttctgaagtttggagtgataatttttagtggaagcaatttgtaatttaagttggtagttatattatatatagaaaagattttttagttaaacttctggacatgagcgtcctgtttaaatttcttgttaatatcgtgccaagcctcaaaaataggcttattccatggaacaagaattaaaaatgaataagctatcaatatataatttaagtacaagtttaggctgggcgtggtggctcacgcctgtaatcccagcactttgggaggccgaggtaggcagatcacgaggtcaagagatcaagaccagcctgaccaacgtggcgaaacctcgtctctactagaaatacaaaaattagctggatatggtggtatgtgcctgtaatcccagctacttgggaggctgaggcaggagactcgcttgaacctgggaggcagaggttgcagtgagccgagattgcgccactgcactccagcctgggtaacagagcaagactccatctcaaaaaaagaaagaaagaaaaaagaaagtacaagtttataaagtattatagtgaaaaattcgcattctggctgattttaagccatttaaaatttatataaaacaaccttccataaaaatttgacaggtgcccagatgttgctttctccatttattttttgtttttttttaatcacagtaggtctgatagagaattggagctaaattataatatttttgttggtaaagttgagttatatacttgtacatacaatggaaatgcttttagtagtgattatttagcaatttttgtttttgttatattaggcatgtttggaggctttcctattctagcatttaaatttaaattttattaaaattaaataatttaaatctagcatttaaatttaaataatttaagtctagcatttacttttaaataattataatgaagttttgaaatactaagttaatccagacctttagttgtcccatggtgttaataaagttgccaaagaagatgtattatgaacaattcagcaataagacaattgtcaacacagttgagaataacaatggtaatcgttagtaatatttagaattggaatttgcctactgaaatagttatagatgattacttgtgatgtgaaactgaattgagcatgacaaccagacatttccagttggttttgtaagttttgagaatctagatactgggttttattttttgaaagattagctctgtttgtaagggctgattccttgaaaatgtaattttccagaaaaacacctaaagaaaataaaacatggacatgcctagtaaattctgtttttttgtttgttcgtgttagtgatggtgggttttttggttttgcaactcacctgtagtcaactcactacaggtgagttggtgccattgctactgatatatctccacagttcatgtcatactaatactgtgggtgttacgccaactctgagtctcacttttaaaaatacttactatgatggcatcatgtgtggtaacagttttcatctttaatagaaaaagaaactggttctaggtcacatggtaagttactgacaaaattctgaaagaatattgggttctttcataaataatttccagcatgtattacatcagtgaatttttttatttttttagacttagtctctctctattgcccagactggagtgcagtggcatgatcttggctcacttcagcctccacttcctgggttcaagcgattttccttcctcagcctcccgagtagctgggattacaagcacatgccaccatgcctggctaattttctatttttagtagagatggcattttcatcatgttggccaggttggtctcaaacacctgacctcaagtgatcctctcacttcagcctcccaaagtgctgggattacaggcgtgagccactgcgcgcagcctacatcagtgatttttaaagtacacattgagtgcgctggggctttttgaaggtgtctcaaagaaagatgatatttaaattagattggcagaacagatttgaaaattcagtccctttatgtctacataagagttactttagattcagacacacaagtagattgaaagtaaaaggatggaaaaagatactccatgcaaacaataaccgaaagagagctagagtggttatatgaataatatccaacaaaatagacttcaagaaaattattttttgccagaaacaacatacaataaaacactcaacccatcaagaatacgtaccaattatatacgtgtgtatatacgtgtacacacatatttctaacagagccccaaaatacataaagcaaaatttaagtggagagaaatagacaattcaacagtaatcattgtagatttcagtaccccacttccaatggctaggacaccatgacagaagatcagtaaggaacttgaaccactctgtagaccaattggatttaacagacatatatacagaacactccactgaacagcagaatgcatatttttctcaagtgcacatgaaacattctttgcaaaatttcagaccacaaaacatctcaataaacttaaaaatactgaaatcatacaaaatgtgttctcttaccacaatggaatgaaactataaatcaatagaaggaaagtggtataatttactaataggtggaagttaaacaatgtactcctaagtaaccagtggatcaaagatgaaatcacagggaaattagaaaatacttgggggtgaatggaaagaaaaagttgatatacaatagcatatgggatgcagtggagctgtgttgagatagaactttatagctttaaatgcctgcatttaaagaaggtttcaaattaataagctaaacttcagccttaagaaattagaaaaagaagggcaaagtaaaccacaaaagaagcagaagaaaggtaataaagattttagcagaaatacgaaatacagaagagaaaaacaattgagggctgggtgtggcagctcacacctgtaatcccagcacttgggaggccgaggccggtggatcacctgaggtcaggagctcgagaccagtctggccaacatggcgacaccttgtctctactaaaaaatacaaaagttagttgggtgtggtggcatgtgcctgtattcctagctacttgggaggctgaggcaggagaatctcttgaacccaggaggcggaggttgcagtgagccactgcactccagcctgggtgacagagcgagactccatccaaaaataataataataaataattgagaatagcaacaaaaccaaaagttgactcttcgtgaagatcaacaaaattaacctttggctaaactgatgaagagaaaaagactcaaattactaagatcaggaatgaacgagggaacgttactaccaaccatacagaagtaaaaatgggcagtggtgcgatctcggctcactgcaacctccgccttctgggttcaagcaatcctcctgtctcagcctccctagtagctgggaatacaggtgcacaccactacaccctgctagtttttgtatttttagtagagatggggtttcaccatattggtcaggctagtctcgagctcctgacctcaggtgatccacccgtctcggcctcccaaagggctgggataacaggtatgagtcaccacacccagccttcttttcttttttgtagagacaaggtcttgctatgttgcccaggctggtctcagacccccaagctcaagtgatcctcttgccacagcctcccaggaatatacttcattcaatagactatacccacaattatatataatgcataatcatatgtgattatattttgcatataatgtaaggagattcatggatcctctgaaattcatctatggatgctctaaaactatgttgctggaacccagattaagaacccttgtctcagcctcccgagtagctgggactacaggcgcacaccactacaccctgctagtttttgtatttttagtagaggtggggtttcaccatgttgtgcaggctggtcttgaactcctgacctcaggtgatccacccacctcagcctcccaaagtgctgggattacaggcgtgagccaccgtccccagcgttagagtgtttctctatagagaaacattcatggctttcatatctttctgaaatggatttttgacttaagacttaagaatcacctggtatagattgtattagggttagggttctctagaaggacagaactaatggaatatatatatatagagagagagagagagagttaagtattaactcacacgatcacaagatcccacaatagaccgtctgcaggatgaggagcagggagagccaatctgtgttccaaaactgaagaacttggagtccaatgttcaagggtgagaagcatccagtacaacagaaaagatgtaggctgggaggctaggccagtctctcctttcacatttttctgcctgcttatattctagccgagctagcagctgattagatggtgcccacccagatttaagggtgggtctgcctttcccagccactgactgaaatgttactctcctttggcaacacccccacagacacacccaagatcaatactttgtaatcttcaatccaatcaagttgacattcagtattagccatcacatagatgatttcttaaggtcccatgcaccatcaaaggctttccaaacctattaggattttaactagatgaagcagttctcaggatttatgtagcatttggattttcttttgtatgtttttaagacaatgaatgaagttctcttgaacgagtgttccatagttgtagcacctcattcccctaaagttctcattttatagagtcacactgattttaattcagagattacatattctgattttctatctatatataattgtatgtctcaagaaaaaaattttttttttgcctttgcagaataaaaggactatctatagttaatttttagttatatcatcttcagattttaagataaaagtcatccttactggtctactttttttctgggaaggtcttgtttgtaaccattgtcaatgatcttttgaataatataagcagttgcattttccaaatcctaactgttgctttaagaaacatgacagaggcattattcacaatagcaaagacttcgaaccaacccaaatgtccaacaatgatagactggattaagaaaatgtggcacatatacaccatggaatactatgcagccataaaaaatgatgagttcatgtcctttgtagggacatggatgaaattggaaatcatcattctcagtaaactatcgcaagaacaaaaaaccaaacaccgcatattctcataggtgggaactgaacaatgagatcacatggtcacaggaaggggaatatcacactctgggaactgtggtggggtggggggaggggggagggatagcattgggagatatacctaatggtagatgacgagttagtgggtgcagcacaccagcatggcacatgtatacatatgtaactaacctgcacaatgtgcacatgtacgtaaaacttaaagtataaaaaaaaaaaaagaaagaaacatgacagaacaatatctgggtgacataaaaacacagaactcaaaatacaaaacttttttccatatccataatgcccacaaaagcctctaaggctgcctttgtctacctgatatcacacacacacatgcacacacacaggagtttctctgggacacttcttagtacttcatgtatggaggtaaaatggataaaagactagcaacaccaaacaggcagaatcctaatggcactgcctcttcaggaatgaagatttgggtcacccaccagttaaataaaaccctcaattaactgaagttttgactacagagaaagggaacataggatgggtagtagaaggaaatcataaatatcaactatcacctcaggagtagatgcagaaacaaggacattagccacaatgcttattttctcctcgctttgtaatacgtatattttatatattggccatttgtgtcttttcctccctccctttttactctgttttttttttgtttgttcgtttttgttttgttttgttttttgagacggagttcactcttgttgtccaggctggagtgcagtggtgcgatctcggctcactgcaacctccgcctcccgggttcaagcgattctcctgcctcagcctcccaagtagctgggattacaggcatgcgccaccacgcccagctaattttgtatttttagtagagacgaggtttctctgtgttagtcaggctggtcttgaactctcgacctcaggtgattcgcccgcctcggcctcccaaagtgctgggtttacaggcgtgagccaccatgcccggctctgttgtttttatatagggtgtttagtgttggttaaccttttaatttagccttcaagttatagtatggcaaaggcgagttgtgttgcactaaaaggaataaatatcagagatggagataggaactgacaggactttgtctgtctcctttagcaaaaagtttatcatgccccaattacgtcacattaggtgatgtttggaagtttaaaccttgctagcagggagtgtatgagtgccaagtaaccaaaaggatggactgtgctgggcattggccattgatactcaacttcagacttgctttccaaactctattgtaggagctggaagcctggaaaccacacttccttgattttcttgctaagagggtttattttcattctactaatgagaggcacgtgtactatttggaaggcaaaagagaaacaagcccttattccttcagccagcgggcaggcgtatgtaggcttgttcagacggcatacgtgaggttctgcaggaccttctgcattttgttaatcacctgcttcagtgctgcaggcagctgagatcatcagctgtgatttcctgcaattcctgcgacttcttgatttcctgcactcactggcagctttccctgaccttcctttcctccagcccttccagtgttttggaagcacctgggttcaatcctttcctgagtgtaatacttgagtgccttctgttttcctgactgaatgctgacagagttttcagatataaaatacaaatggttcttaagcgtaggaaaagatggctgatctctctcataataagagaaatacagatttaaactatattaccacttttatcagatggggtacagtttgaagctcaagaacactctgttgacctgggagaaatgggcactcatgctgctgtgaaaagtggaaatcaatgttgatctatatggagggattttggcaatatctaccaagtgtattcatacctttgtgaatttatgtattcaaaaactactcattacagcattgtttcaagtatcagaaagtctgaaatataaatatccttccatggagaacaagttagataatttatggcataactataaattaaatgctgtaaagccattaaaaagaatgagacaggccaggcgtggtggctcacacctgtaaacccagcactttgggaggccaaggtgggaggatcacctgaggtcaggtgtttgagaccagcctggccaacatagtgaaaccccgtttctactaaaaatacaaaaatcagccaggtgtggtggcacgcacctgtaatcccagcttctcgggtggttgaggcaggagaatcatttgaacctgggaggtggaggttgcagtgagctgagatcacgccattgcactcgagcctgggcaacaagagcaaaactccttctcaaaaaaaaaaaatgagacagctctaaatgtatggttatgaaaagatatccaagctattttaactaaatcaaattttgtatatgtcacaactgtgtgaaaaaaattaaaaatatgtatgtttttaaaacgcacagagtatctctagaaaaatacatacaaattgacaatagtgtttgttgggtccctttctttcaaaagggaatcagtgagcaagcctgaaaatacaggtggcacatttgttaggttttctatgatgtaaagagcttaaaaccaaagataatgttggtattattattattaatcttgtttcaatcttttctaaggatgatttgagatgaaaaaagatgtaggtttgtgaaaggtagaccagagaagccagaaactttgtcttttttttttttttttgagatggagtcttgctctgttgctggagtgcagtggtgggatctctgctcattgcaacctctgcctccctggttcaagcaattctcctgtctcagcctcccgaatagctgggactacaggcgcgtgccaccacgcctggccaattttttatatttttagtagaggtgaggtttcaccatgttagccaggatagtctctatctcttgaccttgtgagccaccccctcggcctcccaaagtgctgggattacaggcgtgaaccaccccgcccggcccagaaactttagcaaacagtgagaatagctgctggaatcacttcctgatcttgagttagatcatatgaagccttgtaagagacccacaagaaattcatggtcatgagcttacagtgagaatacacaggaaactttgtttcctaagtatccacaactagttgctttaaacttcttaaaaccacatttatttcaggctatttttaaagaattaaaatgttacggaatctgactccaaccctgccatctccagaggcaactaccaactagaaattgaaatatatatttttctgatacacattttcgtgtttttactgtataactgtctacccattaacagtttatgttttgtttggttttaaaatttacatataaatagtgtacatatctttttgcaactgatttttttcattcaatattagtgtttttgagatttatatgcatcaatgtgtgtaattctagttaatccattttagctgacaattctagttaatccatttatcaatttaattgataaatcattttatcggtttatcacttgcactcacataaactgaaagaccagtttatcagtttcccttctgctgtaatctgatgtaccccagactactctccctcctttctgttgcccaggctggagtgcagtggcatgatcccgtcccactgcaacttctgcctccttgattgaagcaattctcctgcctcagcctcccaagtagctgggattacaggcatgagccaccatggctcatggctaatttttctatttttagtagagacggggtttcaccatgttggccaagctggtcccaaactcctgacctcaagtgatccacctgcttccacctcccaaagtgctgggattacaggcatgagccactgcgcctggccacactcttctttcttgatgagtgtagctcctgctactcattctcatgattatactcaagaccttaccattaccctgacattaccaattcatattctcaattttatgcatccattctgtttatcacttctcatatttcaagtttagccctttccagtatcccagcttcaacagtcctttgaccccattgggaccttaactccgttgatcctattacctttcatctgctcattaacccctctgcagtctcttttataacctagcttcaattccattgcagtcattaccactcctttcatacgtcttcaactcccttactcccctcttacttcatcatacacattggaaaaactacagcccagattaaatccatcctccagctactccctgcccctttgacactgaagaaaataaaggaaaaatagacaaccacactgactggccccattttaactttatgaccatgaatttcttgtgggtctcgaatactacctgaccataattctgtgtttccttagtctattcattcttcctctctcattgatgactatttcatattttacattgtctcctctttcatctaactcccattcctcctccccaccctcccttttggctaatggctaagagaatccaagtaacaagggggagaatttccacaatcttatcacatctactgacctaccaacacctgcactcacagactctgccttcttgcctaccagtattcgtgcttttctctaaaggcaacctctccacttgtgaattaggtcctactcttacctattcaagaactactgtagcaattctcacttctatcctgaatgatcatttttttttctttatattgcagctccctgctagcatataaacactttcattttgcctatcttaaaacccttttatcttccccttttcactgtcaactgtcttctgtatttccttgctcccctttgcaacaaagcctgagatatatgtactttccaaatccgattctcctctcattctctcttgaactcgctcagacttttgtctcttacatttcatcagaactgctcttctcaagatgtcttttattgtgtagtccagtatttaagctgttgtccttatcttattcaacctgtcagcagcatttgacatgggtggcccttccttcctccttgacacttttccagttgcttccagacaccatactcttggtctttctcctgtctcactagctgcttctcagtctcctttactggttccttctcatggccttaaccttctaataaggctcaatccttgaatctcatctctagctacatcagaccccttagtggtcttatacagtctcatggatttaaatactatctagttgggagtggtggtgtacctgcagtcccagctacttgggaagttgaggcaggaagatcccttgagctcaggagtttgagcctgtggtgcactatgatcttgcctgtaaatagccattgtaatctggcctaggcaacataggccccatctctatttaaaaaaaaatactgtctatacactgaacaactctagctcagatatctcttcaagatgcctgtctaatttccaattcagaactcaagatgcctaattcccaattcagcattttcatatgaatgtgtagtatacctgtaaagtaaacatgttcagaactcagcttgtcttctcccctcaaacctgctccatggctgggcacagtggctcatgcctgtaattccagcactttgggaggccgaggtgggtggatcacctgacgtcgagagcttgagaccagcctggccaacatggtgaaaccctgtctctactaaaaatacaaaaattagctggatgtggtggtgcatgcctgtaatcccaacttctcaggaagctgaggcaggagaattgcttgaacccaggaggcagaggttgcagtgagccaatatcccaccactgcactccagtgtgggtgacagagcgagactccgtctcaaaaataaataaataaaaatttttaaaaaccctgctccgtgggttacacgcttctcagttgatggcaacttcatccttccaggtgatcaggcataatatgagttatccttgagtcttctctttaactctcattccacatccaatctgtcaggatttttataggctctatattcaaaatatatctagaacccaacactgttgttatcattctggcccaagccatcaccatttctcacttgaattactgcagtggcttcctgcttccatccttgcttccccgtaagtgtagccagagtgatccctttaacatgcagtcagatcactttgctcctctgtttaaacctctgtaatggctgctcattcattcagactaaaaagcccacaagtccttacagtggcccacatgactgtatcatctaccccttgctccacttcatcttattgtaaccctctccccttggctctcttcacagtctcaccagcctccagcttttggatctttacacagtctggttcttctacctggtttgctctttcctccagatatctgcacaataattccctcatctcttttaagtttgtgctgtgtcacctacttaataatgcctactttgatcttctaatttaaattgtcactggccacccactccccaccccactactgccttacgtatttgcagagggtggcatttacatagaacataatatgaatggtatccttgaagttgtggaaagtagctttcctgtattacgtaagtaatacgtaccatacgtatgtattaggcttattgtttgtcttctttaattaatatgtaacctcgccaaggagaggaatgtttgtcttttttactcactggtgtatcccaaacatgttgaatggtccctggcatatgcgtgcctagtgagtatttgtagaataaatagacaattagattatgtccaagttatttatttatttatttatttattcatttatttatttattttttgagacagagtctcgctctttcgcccaggctggaatgaagtggtgtggtgtgatctcaactcactgcaacctctgtcccccgggttcaagtgattctcctgcttcagcctcccaagtagctgggatttcaggcacctgccaccatgctcggctaatttttttttttttttttttggtatttttagtagaggtggggtttcaccatgttggccaggctggtcttgaattcctgacctcagatgacccacccgcctcagcctcccaaagtgctaggattacaggtgtgagccaccatggctggcccaagtttttgatactataaacaatactgaagtgagtatctgtgatggttaattttatgtgtccacttgactggattacgggcacccaagcttttgaccaaacattactctgggtgtgcctgtgagggtgttcccagatgagattagcatttggattggcagactgaatacagcagattgcccttcctaatgtgggtggacctcagctcatcaatcgaagacccgaatagaacacaaaagctaagtaagagggaactcctcttctctggctgcttgagacattggtcttttctggccttaagactcagactggccgggcgtggtggctcatgcctgtaatccccacactttgggaggctgaggcaggtggatcccctgaggtcaggaattcaagaccagcctggccaacatggtgaaaccccatctctactaaaaatacaaaaaatagctgggcgtggtggcgggtacctgtaatcccagctactttgggaggctgaggcaggagaatcacctgaacctgggaggcagaaattgcagtgagccaagatcacaccattgtactccagcttgggcaacaagagcaaaactctgcctcaaaaaacaaacaaacaaaaaaactcagactgaaacatcagctcctgggtctggagcctcgtggcttttagtattaataacatcagctattctggttctcaggcctttggacttgaacaatggttctcctgggtctccagcctgccacctgcctatcttgggacttctcaacctctgtaatcctgtgagccaattccttataattaaacacacacacacacacacacacacacacacacactctctctctctctctctctctctctctctctattggttctggttctgtttctctggagaactctgggtaatacaatatctttggcttatctccttgtgtacctatgtaagaatttctctaggaagattatgaaggagtgaagttgcttggtcttaggggtatacgtatgttccactttattagatattgccaaagtgcttttaccaatctaagctttcttctacaactgtctaatagtttatgtttccacataattttgtgagtcctgatggtcaatctaatggatttttaatggttttttttttttttttgggaaacagggtctcgctctgttgcccaggctggagcgcagtggtgtgatcatagctcactgcagtctcagactcctgggctcaagccatcctcctgcctctacctacctagtagctgggactataggcacaggccactgtgcctggctaattttcttattttttatagagatgaagtctcaccatgttgcccaggctagtcttgaactcgtgacgtcaagtgatcctcccgccttggcctcccaaagtgttggaattatggactcgagccaccacatttggctgacagtatcgcttaatttttaattttcctactgctactaattttacctatatgagatcgcatttttgtgagctaaaactatcaagtattggcaatttaatgaggtttaatctaatagtgaatatctttacaatgaaaacttttgccacccagattttgtctatatattacttgcccttatattcttgacatttttctattagattgtctttctccaaactgctctttcccccttctctcctttttgtagttctttactgatagcttctcctggtctatggttgagagtatgttgtcctttttatagagaaattttgatgccaccaaaatttggacaccagtatccattacctgccactctcaattacccttaaccgccccccacccccgtggccttaggcaacaactaatcgactttctatatgtacatatttgcctgttatggacatttcatgtaatggaatcataaaattccattctttcaattactgggttcctgccattctcctgcctcagccttccgagtagctgggactacagctgcccaccacggcgcccggctaatgtttttttattttttagtagagacagggtttcaccgtgttagccaggatggtctcaatctcctgacctcgtgatccacccgtctcggcctcccaaagtgctgggattacaggcgtgagccaccgtgcccggcctagcatgtttctttcagtgagcatgtttcaactagcatgcttctttcaattagcacgttttcaaggttcatccatgttgcagcgagtatcagtgcttcatttctttttattgccgagtaatattctgtcatatggatacaccacattttctttattcattcatcagttgatggacatttgggttgtttccacttttttggctcttatgaataatgctgtgaacattcatgggcagtgttcttgtttattttaatagttttttgtttgtttgtttgtttttgagatggagtctcactcttgttgcccaggctggagtgcaatggcacaatttcggctcactgcaacctccacctcccaggttcaagtgattctcctgcctcagcctcccaagtagctgggattacaggcatgtgccaccatgcccggctaatttttgtatttttagtagagacggggtttctccatgttggtcaggctggtcttgaactcccaacctcaggtgatctgccagtctcagcctcccaaagtgctgggattacaggcgtgagccgccgtgcccagcctagttttgttgttgttgttgttgtttgtgtttttttgagacagagtctcactccgttacccaggctgaagtggagtggtgatatcttggctcactgcaacctccgcctccctgattcaagcaattctcgtgcctcagccccaccaagtagctgggactgcaggcatacgccaccacacccagcttatttttgtatttttagtagaaacagagtttcaccattttggcgaggctggtctcgaactcctgacctcaagtgatccacctgccttggcctcccaaagtcctggaattacaggcgtaagctaccacccctggcctattctaatagttttttttttttaaagcagattccttagggtttactacatacaaaatcatgtcatctgcaaatacagatagctttacttcctttccaatcttgatgccttttatttttgtctctaacctaattgctctgtctagaacctccagtacaatgttgaacagaagtggcaaaagcaggcatccttgtcttgttcctgatcttagggagaaagcttttagtcttttaattatgatgttatctgtgggtttttcatagataccctttatcaggttgaggaagttcccttccggtcctagttagttgagcattttatcatgaaagactgttggatttttttttaatttgaatatgattttactgaagcatacatcatttcaaagcaaaattagtttatgttgtcaattctaacatataatacatttaagtcattatatgaatttcattttttgtgtatttcactgtagtgctgtgacaacaaaatgacatctgtgtcccagagcatacatatatcaacagtaagatgtaatttttcattacatcactgctagaatatttagctttgtgtaggagacctaagcatgtaagatggccacactaaataattttctgtttttttccttaggtaatcttaattttttatcagtaatactttatagctgttagttgtgcattggcagtataaaagctaatatatactgtatggtcttgcaacagttttaaagcctctgcataactgataataaaaatgcatgacatttttgtttttaatagacttttaaaattatagttttaggtttaacacatagatctttgtacacttgactttttgacatagcaaggccaaaaataactttctgaatatttttttcttgtgtataagtggaaagggcatttttcacatataagtgggctaaccaatattttcaaaagaacttcatcattgtgcaactaacaacagtaactagcccttaattatggtgacagttccttattggtgtgtgtgagattactctagcagctattacagtataacacagatgatcttcacacaccccatcacccagataatttacagttctgaaagattgttggattttatcatgtgcttctgcatctgttgcaatgatcatacagtttttgtcctttcttctcttgacatgggatattcaaatatcacatgactgggatcaatttcacttggtcatgacgtataatcctttttatgtgctggattcagtttgctagtatgttgttgaggatttttgtgttagtattcatctttgtctggtttgttatcagggaatactgacctcatctccaccttgccttcaactgtgagcagctgctttgttaattaacgtgcatcccaatctgtattccttccatgttgctaagggatttgcttttctttctattttccttgtatctgttatttctttgtgtttatagtatgtggcattgtactttaggtcatttttccatgttgccagatctgatagtcaaatttttgaaagaaaaatattttttgcttaatttttatatgcacattatagaaaaacctagaggcaaaaaaaaaaaaacttttataattctgcttacagagataactactgttagcattatgtttactccatgtctttctaatctcatttctgtgtgtgtgtgtgtacaggtatatatgcacatgtataaatacagctaaactaaagaggaattgatgccttttatactatattatattattttattattattatttttgagatggagtctcgctctgtcacccaggctggagggcagtggcatgatctcggctcacttcactgcaacctctgcctcctgggttcaagcgattctcctgcctcagcctcctgagtagctgggattataggcacgcaccaccatgcctggctaatttttgtatttttagtagagatggggtttcaccatgttggccaggccagtctcaaactcctgacctcaggtgatccatctgcctcggcctcccaaagtgctgggattacaggcgtgagtcaccatgcccggcctgtactatcttataacatgacttttttcactaaagatattgtcaaaacatttacgtgttaatcagtgtattcctaccaggtgatttttaatagctacaaagtatcccatcatggttctataatgcaatttattcacccatctctgttgttgcatatttaagggttattttttaaaagtttgtttttataaacaacactgacacacgtccttgaaactgcatctttgcctccatctatgtttgtttccttagtataaattgctgacagtagaatacctaggtcttatgaatgtttttggtatttactgaaaaattgagttgatttcttctggaacaattatcaaccagattcctttttaaaaaattctgattcagttatgtaagctctacatggtgtgaaatggatttatatgtgtctcttcccagggctgtaggcattgcgctgtaattttctgctaaggttactaagaggtagtctctggtgcgactttcctacctaccgtagttcatacgtgctctgaagtattagtacgtgcaccaaaggagaaagtttctctatgatgacttttcaacatgaaaaataaagtgtagatgcctcacatcatttatctgctccatttaccagcacccagcctcatcctgcctcagcgaacttaataagattaacagatgtcatttctttaatcttcattagaatactgtcaggtaacagcgtcattctggggttaccagaactgaggcatagaacactgatgagagggactaaaatcacgggaaaacattcctcaggccttgcaacttccaatatagtcaatccatacttttctcaagtagttttttttttttttttaacagagtactacatcagaagccttcaaaatggaattggtttattattcaaatattctatttcataaattataaattatgtaaaatatggccatcattcttgcttcaaagcactgaaaagagacatgataagattctaagaaattatcattaatgttattaagtttcacaatggcattatgattatgtatggatgtggacataatttttacatatgcatattgaagtatataggtggaaaaccatgaagtctgatatttgctttaaaattcagtggggagggagagaaggagagaaggttggatggatagttgaagcaagtatggcagaatttgttgaatttgtgtgttgggttgatggctcattgtactattcttcttttgtgaacatttggcgtttttcataatttaataaaaggtgtttcctttaagttggggagagaggaagaaagggtagaaagagaggaaagagagagggagaaagagaagacaaagagacactcacagagaatcctgttgagactgagtcagtgagaccaagtcacaggaaatctgtctgataaagggaaaaacttggctgaagctgactttgttatgaattagcttcctgctgccatctaatggcacacacgtacttatggatatgtatatgtgtatccatagacaacacacacacacacacacacatgcgtttctattgctcaaagcctgtatctatctgtttttaaattatttccccacatcataaacatcttttaatctcatctcatttaccctcatcacatttttgagagagtaaaaaaaatgtagggatgatgctatctttttatagacaaaactgaggcactgaggaggtaagtggctttgccacttttgaaaagctagatcggctgggcagggtggctcatgcctgtaatcccagcactttgggaggccgaggtgggtggatcacaaggtcaggagtttgagaccagcctgaccaacgtggtgaaaccccgtctctactaaaaatacaaaaattagctggacgtagggcacatgcctgtaatcccagctattcaggaggctgcggcaggagaatcgcttgaccctgggaggcgaggttgcagtgagccgagatcgcgccactgcactccagtctgggtgacggagcaagactatgtctcaaaaaaaaaacaaaaaaagctagatcaacatgacctctttccttgaacccatgctttgtgacatctgtctcagaactgccctggttgcatttcctagtgttagtccttaaagcacaggaatgacgttattaatatcaatgagatatggaaactcatttgaaaccatctctgatctctgtcttcatcatcgcatggtattctccctgcatgggtgactctttccttcccgttttcatatggactgcaatcattttggattagggctcaccctacttcagaatgacctaatcttaaccaattacatctgcaattaccctgtttccaaattaagtcgcattctaggtactggggattgggactcggtgttcatactccagtgtatgaataatgagaaggggacacagttcaacccataacactcccttttctgaaacttctcgctagatttgtgttttgttcatgaactgtctcacattgcatatggttttctgcctttcttctctttctggattgtaagttttttttgttttttagatggaatcttgctctgtcaccaggtgggagggcagtggcagtctctcctcactgcaacctccacctcctgggttcaagtgattctcctgcgtcagcctcccgagtagctgggactacaggtgcaagccaccacgcctggctaattttttatattttagtagagacagggtttcaccatgttgaccaggatggtctcaatctcttgacctcgtgatctgcctgcctcagcctcccaaagtgctgggattacaggcgagagccactgtgcccggccaatatttttttttcttttttttttttgagacggagtctcgctctgttgcccaggctggagtgcagtggctcgatctcagctcactgcaacctcggacttccaggttccagcaattcttctgcctcaggcctcccaaagtgctgggattacaggtgtgagccaccgcacgcgacctagattgtaagatttgtaaagtctgtggtttgtcgttataaaatccatagtgctaagcacagaggctggatagatgtttattaggggccttacatttcttcactatggctacctttgggcatccaggttaggttatacctccaaagagcaagaggcaggatttcattaaaatgttgatgaatccaaagttcttctacgtacctgtctgcctgcactgaagttcataagtttatgtatcattgttggagtcaggacaaaatggggtttgagagtcaggttgagaacccagggggtgagaatggatgagagagagggagagagagagagagagagagacgaaagaaagagagaaagtgtggctatcacaaagccaggggagacactgagttaatgatggtagcatgatatcagagaatcagaaatatgccataaaagaagtgaatacaaggattacaagaacatttcaaaacctaatgctagtgttcaggggacagagatcctgcaagagttgaagagagggagtaagccacaaaacaattccaagcaccggtgtcaaaggggcaaaatatctggccaaaggttcaggcaatggaagtagaatatcagaagcaagaaatcgatttgatgatgagccaggtcatggccttttcctggggatcttacatccctgggaaggccaggaacaggtccataaattcagccaatctaggatccacttggagagagaaggggaagcacttggctggagcaggggcttgcatagcctctggtagccactgacaagacctcagcacgggaggccaaccctcagacgcattgctgttcatttagtcaaaatgctgagctgtacaattagaaaaaaataactcattgtcccttctctcaagatgctgacaggttcatgggggaaatcaaacaccttcaagaaaaagtaagcatcctacaaagtagtaacacaatttacgtaggaagttggatttaaaaaaaactaatttttaggcctggtgagttgtcttatgcctataatcccaatattttgggaggccaaggtgggaggatcgcttgagcccaggagtttgagaccagcctgggtaacttagcgagaccccaatctacacaaaattaaagaattagccaggactggtggtttgcacctatagtcccagctacttgggaggctgaggtgggaggatcacttcagcccaggaggtcacagctgcagtgagcggtgatcctgccattgcactccagcctgagcaacagagtgagactgtctcaaaaaaaaaaaaagaaagaaactctgtttttcatagagagcctacagacatttcttaaggggaatcagctgtagtctagttagggaattatgcaaatatatcaaagaactacattacttttttttttttttttttttgagaaggagtctggctgtatcacccaggctggagtgcagtggtgcaatctcagctcactgcagcttcttcctccagggttcaagtgattctcctgcctcagcctcccaagtagctgggactacaggcatgcaccaccacacccaactaattttttttgtatttttagtagaaatggggttttgccatgttggccaggctggtcttgaactcctgatctcaagcgatacccctgccttggcctcccaaagtgctggaattataggcatgagccactgcacctggcctagatcacttttattagtatgtgatttgaaacagagcacatgtagttcatctaacaaacttcgtagaacatttctttacagtgtagtaccattgtaatgcaaatggcatttataatgcagagggagaggtttgacatatcgttttactctttgagatacagcgtgttcctagtgtggtattttttttaccttgtttggaaaccagttagcacagctaacctttgtctcatggaaacttaaatcactgttggttaacctgggggcccagccatcatctgtactgatgatcacctagtgatggttacattctagtgcggtgtctgaatgtccgaggtatatttggatcacttttaactgaagacccagtctttgtttgttttttttttttccaagacggaatgttgtactgtcgccccaggctgaagtgcaatggcacaatctcggctcattgcaacctctgtctcctgggttcaagagattctcctgcctcagccttccaagtagctgggattataggcgcccaccaccacgcctggctaattttttgtattttcagtagagatggggtttcactatgttggccaggttggtctcgaactcctgacctcgtgatccacccgccttggcctcccaacatgctgggattacaggcctgagccaccgcgccaaggctaggacccagtcatttaatggtctatatttctgtgcagtttttagctaatataatactacagtggccttctttacgggcatggttgtttattttatttaaaaagtaactttaaaaattattgtcctaaaatctcattctgaattactcttctgttgttctcagtgtgtgtaagaatcttgccttgggcttgttttgaatcccccagccaggagtggtaggaactttggagttcactgattaacagcaaatggtgggaaagcgcagaatttcctggagccacatgatttggtagcaggtgcaaagggaactctatggtttgagctattacatcccagaggcatgatcgaaacaaaacctctttttaaatggggttaacctagaaggtgacaattaaaatgttgagagatattgttaggacagccactgtgggcaagtagtggtgcccataggagagatgccagaagacgactaaggaggtgtcacaaccaggagcagagaccctgcagatggcaactcacaacaaagagagcgaggatcaggtcaaaagctcagggggctgttcaacaaattttgataaaggtgacgtggagttcaatctgaaaccaggaagtggaagacctccctgtgtcccctacaacatctgtcaacaacgcctgcctttgtgttaaaacgaggccggaatggggagcaaactaaagaacggggaccagtttcctctctttgtgccccagttccccctcctttgtatacaccctccatcctgaatagactctggttctcagcgctaacaccgacaacattcatcctgtagagaaacaaatgttgctcagaaggacacagccaaagaatcatcagagagttgggagccaagacccccgaggtagcacttgtggaaatcaagtctacataagataacccatgcaaacaagccaaacaaggccaacattgaatgtcacatagactgtttttttcccatcataaggcagaactttgatagaacagcgagcaacttgacgacatggttttagactgttagaccctagtggcggccacgactggctgatgagtgtttccctcgttgggcattttaaaaaaaatcactaaatactttatatctcttagaatttttgttgtaaacatgttgaaagagctgttttagaattagctagacattgatttttttctgatttttatgtcactcttgtgcacagattaaaaaaagaaaatacaaacaaatctaattggtcaaggtattcctaaacgtttttgcattcagaggctctttcatcaatcatctccaccccccaaccctggctttactgaagtatgattgacaaataaaaattgtacacatttggccgggcgcagtggctgacgcctgtaatcccagcactttgggaggccaaggcaggtggattacctgaggtcaggaattcaagaccaccctgacaacatggtgaaacctcatctctactaaaaatacaaatttaactgggtgtggtggtgcatgtctgtaattccagctacttggggaggctgaggctggacaatcgcctgaacccgggaggcggagattatagtgagctgagatcacgccattgcgcaccagcctgggcaacaagagcaaaaaaactctgtctcaaaaaaaaaaaaaattgtcactttgggaggccaaggcgggtggatcacgaggtcaagagatcgagaccatcctggctaacatggtgaaaccccgtctctactaaaaatacaaaaattagttgggcgtggtggtgtgtgcctgtagtccctgttacttgggaggctgagtcaggagaatcgcttgaacccaggaggtcaagatagcagtgagctgagattgtgccactgcactccagcctggcaacagagtgagactttgtctcaaaaaacaaaaaaattgtacacatttaaggtgtacaatgtgatgttttgatatatgtgtacattgtgaagtgattatcacaatcaaactagtcacatatctgtcatgtttgtttgtgtgtggtgtgaatgcttaagatctattttcttagcaaatttcacgtatacatttttttccccttttttaaagagataggatgtcactacattggccaggctggtttcaaactcctgggctcaagcaatcctctacctcagcctcctgagtagtggggattacagaggcatgccacagtactccacaacacattattattaactatagtcaccgtgctgtaaagtaggtttccagaccttattcaccttataactgaagttttgtaccctgtaaccaacatcccccagtccatggtaaccaccatactactactccgtgttatggtgagctcgacgtttatttagattccacacgagtgagatatgcagtatttgtctttctgggtctggcttatttcacttaagataatgttctccaggttcaccagtgttgtagatccttgggcatttttagaagtgaaggtctgcctgtgaagatttcctagaagcttctgccctctagcgcccagcctgagaggtagtgtggcaccatccctacttatccgtgcttccttcctcaatttacaaatcgtgattcagcgtgagaaaatgataaagtcagcaggatggaggtgagtagtgcaaatacatagcaaatactgtaaagattgatggaagagaaattgggagaatctagttaactagacccaaaagcatgcacacaccagtattatttccttccctttctctcgccccctccgcttgtaagttaccctccaccccatcccttctccaggagaaacgtgcagccagtcctcaaagtcccccatcactggtcatgtccttaatctccctgctttcttctgcccttctttccaagtggagaatgtgggttacctggtgggagaaagcagatctgactgaagttctctatggactccagtagaaggcataacttcgtataggtgggcctatatccgtcatttattgttttctaaaaacagatttgttatgatgagaaaaataatgcacgctaattgcagaaaagtacaaattccctcacttatttatttctgcatgcagatgcttatttaactcaggctaagtaggttaaggtaagaaattctggaatgggaagacagatcattagagaagaggatagtggagcttctaagagagtccaggtagggatcacacccagactctgcattctttcccctcctctgaacgctgccccttgacgttcttcggtttcccttccttcagagcatgtgcccaatatcactgtacacattcacgtagttctttccgcctctgacctgtgattgcttggggatctgagcaccacggactggactggggtgacctggtgggttgggctgaatgcgggcgctggggcagctgccatggccaagccttgccctggagaacagctgtgctgggcccactcagacgtacgtgcctccccagcagactggctgcatctggtatcctctttgacttcatctgcatctctgtaactcgaggtcaagcagaaaagaataacctgttgaaataacaaatccattaagttatttttaaatatggataagtaaaaaataagaaaacagaaatggtttataatcccacctcctagctagcctttgtggatatttaaaaaattacaggcacagccttaaaatgtgcaaaacagcacgggaaagtccaaatgaaaagtagacagactttctttccagcagtccttcatttcaaagataaccattactgtctgggaaaaaaatatgtatgtgtatactatcttttaaaatttgtagaacatagatttttttccatattcattctgctgcttttttcttttttcacttcctatttctcagagatatttatacattggcacatctagatgtaattaatacttcttaaaagtgcatagaattccatttgtaaggtagcgtaatttatttagcttcttccttactcatggatattcagggtttagttttctcgctataaccacattgcaatgaacgtatgcttatgtctgtcttggaatatttttgttggtgtaatcgacagggtaatttcataggagtggaagtgccaagttgcataatgtggaactacactttaaaaaggtattggtacagtttgtcaaattgcccttaaaaaagatcatacacatttggccgggcttggtggctcatgcctgtaatcccagcaccttgggaggccaaggtgggcagatcacctgaggtcaggagttcaagaccagcctggccaacatggcgaaaccccgtctctactaaaaatacaaaaattagccaggcgtggtggtggatgcctgtaatcctagctactcaggtggctgaggcaggagaatcgcttgaacctgggaggcagaggttgcagtgagcagagatctcaccattgcacgccagcctgggcaacaagagcaaaactctgtctcaaaaaaaaaaaaaagcatagaagtttatactctcaccacaaagtgaacaaggttgagcatcttttcatatgtaaaatgacagttaatattcctttttctgtcaattgcttattcatattctttgctgatttttccattgggttcagcatttactgatttggctgagcttgataaattaagaaaattaggcttttgtctttcattgtattttataaatgttttctccaatttgtcttgtgttttaactttgtgtttagttcttgtttttgtttggtttggtttttgctgcagcagcatttttaacatttcatacagcaaatttggcagagcacctttaggctattggcttttctgtcttattttgaaaggtcttccccactgcaagcttatacatcaatttacccatgctttttatttaaaacaacaacaacagcagccgccaccacatggttgttgtcaggaaagccagctagtaaatgcagaaagtttataaaatacacttaagaaacagaaaaaaatgttatcgtgaaattgctagagatagtcactgtgaatattttgtcatagaaagttcttgcctttgtgaaggacgtgaacagacacttctcaaaagaagacacttatgcagccaaaaaacacatgaaaaaatgctcaccatcactggccatcagagaaatgcaaatcaaaaccacaatgagataccatctcacaccagttagaatggcagtcattagaaagtcaggaaacaacaggtgctggagaggatgtggagaaataggaacacttttacactgttgttgggactgtaaactagttcaaccattgtggaagtcagtgtggcaattcctcagggatctagcactagaaataccatttgacccagccatcccattactgggtatgtacccaaaggactataaatcacactgctataaagacacatgcacatgtatgtttactgtggcattattcacaatagcaaagacttggaaccaacccaaatgtccatcagtgatagactggattaagaaaatgtggcacatatacaccatggaataccatgcagccataaaaaatgatgagttcatgtcctttgtagggacatggatgaaattggaaatcatcattctcagtaaactatcgcaagaacaaaaaaccaaacaccgcatattctcactcataggtgggaattgaacaatgagaacacatggacacaggaaggggaacatcacactctggggtctgttgtggggtggggggaggggggagggatagcattgggagatatacctaatgctagatgacgagttggtgggtgcagcacaccagcatggcacatgtatacatatgtaactaacctgcacattgtgcacatgtaccctaaaacttaaagtataataataaataaataaaagaaagttcttgcctttgattctatgcagtaactgactgtattttgatgtcatgaattatacttgttaaatatttgagttatattttttaaaaaaagttttttcagctgtaatttatatatcatgaaattcacccattttagatgtataattcaatgatttttagtaaacttacagaattgtgcaatcatcactacaatctaagtttagaacctttatttccttcaccccggaaagaaaccgtgtgtccatttgctgtcactctccattccctcccctcagccttaggcaaccaataatctacttcctgtccccatggatttgccttttttgaacattttatataaatggaatcatacaatatgtatgtttttgtgtgtttggcctccttcacttttgtgtgtttggcttgatttgtgtttgctgaagttggggcacattcagaatggggttgacaccttaggaagtggaagggctaagaggcaggttcaccaaccagcagtggggtcaggaacgtgctgttgttacctctggaatatcaaggccaaggtctctcaatatttcctgtcccccagagtaggcccttcacttaatatgaggttcatttatattgtagctgtatcagtacttcattgtttttatggctaaatagtatttcactgaatggatatgccagttttgagtatccattcatcagtggaaagacatttggattgtgtccacttttcagctgtcatgagttttatgctagctataaacgtttgtctacaagtttttatgtggacatagtttcatttcttctgggtgtgtatcaaggaatggaattgctgggtcacatggtaactttatgttaatatttggttgtatttttgaggagctgactgggaccaatccatatcgaaaaccttaactaggaagtgcagacaggagcctccagaggaaaacctccccagagggttaagacctgtgcagtgtttaaagttagaggactttacagctgggcgcggtggctcacgcctgtaatcccagcactttgggagggcaaggggggcagatcacgaggccaggagttcgagaccagcctggccaccatggtgaaaccctgtctctactaataatacaaaaattagccgggcgtggtggcacgtgcctgtagtcccaggtacttgggaggctgaggcagaagaattgcctgaacctgggaggtggaggttgcagtgagctgagatcgtgccactgcactccagcctgggagacagaatgagactccctctcaaaaaaaaaaaaaaaaaaaagttagaggactttgaatagagcctaaggttatctttgggtcttgacctaacagaatgttagatgtgtttctttttgtgtgatatcagttgagacactaatgtgtaatggacaacaaatacaaaaatgagtgttaagactgaaccccacgtgggcaaaacttagaaagggtcaggggtaaggagacgagaacagatgtttgtacacccatgttcagagcagcattattcacaatagctgaaaggtagaagcatctcaagtgtccactgatggttgaatgaaaaaacaaagtgtggtctctccacacaatggaatattattccatcctgacacgtgctataacatggatgaaccttgaggatattgtactcagtagaataagccagtcataaaaagaaataatgtatgattccacttacatgaggttcctagagaagtcagattcatagagacaggaagttcaaatggtaggtgccagggactgggagtcgggggtgggggagttcatgttagaaactctgggtacagagtttcagtgtgggaggattaaaagaattttggagattgttcggcggttatagttgcacagcagtgtgaatatagttaatacaaccgagctatacatttgaaaatggtaaaaatgctaagttttatgttgtatgtaataccacatacaaagtaatgaaaaagagggggattccagtatagtcagaggaggcgtatttgtctccagactctcctcttctcctccactccgcccgtggctggggaaagggcttcagtaggattgtccatgagcttgatttgtgtttgctgaagttggggcacattcagaatggggttgacaccttaggaaatggaggggctaagaggcaggttcaccaaccagcagtgaggtcaggagcgtgctgttacctctggaatatcaaggccaaggtctctcaatatttcctgtcccccagagtaggcccctccgcgggagagctggcgagagcagtttgtgagtgctgcctggggagccactgggaagggtggagtctgcagcagcatgaagccatgtggagtgcacagtggggaaaagcagcctggggggtggaatgttttgttcaaagcctgagaattaggtgagaggcctcagcaattgggtaattaaaaagaaaacaaaagcccatgaaattgcttcgtggaagtaagagtttgctttcactgtgtcaagcccagagtgcagggagccacccagctaagtagaatccattgcctctccccaggaagggccccaaacagcagctagtgggagaatgcagaagaggagaagacgcccacaccttcttctccaaagcaggcagtctttagacctcacttagccaagaagagaaagactctgaatgaggactgaatggcttgttagtatcttggactgaacctgtacaagttactaaaccaatgctgattttatgatcttaacactgtagaaccatccattatctaagagtgaatgcagaagtcatgagatttgcccaagtatccattcagggatagaggaaattatctccataattatattttgaaggcaccacaggagaataaacaaaaacaaacaaacaaataaaagacagttattggctttgctacaaaactggtttagtcaatatacaaattgtactcccagcccttttcccccccagaatatctttatttttttctacatatgaacacttttttccccagtgtctttgtaaagacttttatttttgtggtccacatgctttaacttgtgtatggaaataatctggaccgagtcagcaatcgtgggttctagtctgtggtcttctttattttattttaattaattaattttatttatttatttatttttgagacggagtcttactttgttgccaggctggagtgcagtggcacgatcttggctcactgcaacctccacctcctgggttcaagcaattctcctgcctcagcctcctgaggagctgggactacaggtgtgtgccaccatgcccagctaatttttgtatttttagtagagatggggtttcaccatgttggccaggatagtcttgatctcttggcctcgtgatccacctgccttggcctcccaaagtgctgggattacaggtgtgagcccctgcgcccggcctcttcttttttttaatttaaatttttattttaagttctggggtacatgtgcaggatgtgtagagttgttacataggtaaacgtgtgccatggtggtttgctgcacagatcaacccatcacctaggtattgaacccagcatccattagctatttttcctaatgctttccctccccgagtctcagtcttcttaacagagggtggtggggggaaagaaatatgtctcttgccatgtgacaatgttattatgaagattaatatatcagcactgggctatttatttggggagtgagggtggaaggaataaattctacatttatacctttaaaaattgttaaatactcttctattaatatttgagcctcctttctttatttgcattgtacatgaaatagtccttacaaaatgaatcatttaatatgttggcacaaatatagtctttcttagtcaatgttcgcatagaaaccatgtggaattattttactcaaaaagggagttattagaaggatgctggtgaaggatatctgcattcctgagggccaagacccaggaagcaagaagccatcaggaattcccaggcctcatctgcttcattcttttcttccaagattatatcactgtagtttcagccaaacacagagatcataattccatagtccccaagaaacagctaggttagggacataggtctcttaatatagaagggctgccaggaactcagctagtgggtgtgtggggacagaccttggagaaaaggggtaattgtgcactggattgacataaaagaagtgtctgctctgaagctatagcagcctcccttatccatggggtattgatatgtttcaagaccccaatggatggctgaaaccttaaatactactgaacactagacatactgtttttccctctacatacctatgataaagtttaatttataagtcaggcacagtaagaaatgaacaacaatagctaataatgaaatagaattatagcagtatactttaataaaagttatgtgaatgcggcctccttctctctcagaatgctttgttgcactgtaccaagggtaaactaaaaaccatggacagtgaaactgcagataagcggggactgttgtatttggaaatgaagctgtcattcatttccttcctgcccaccaaaaacccactgtattaggccattcttgcattgcaataaagaaatacctgagactgggtaatttatgaagaaaagaggtttaattggcttgcggctctacaggctgcacaggaagcatggcaccagcacctgcttggcgtctagggagtcctcaggaagctttcaatcatggcagaaggcgaaggggagcaggtacatcacacggtgaaagcaggagcaagttggggtagggaggtgccacacaattttaagcaaccagatcacgtgtgaactgagtgagagctcacttatcaccaaggtgatggcccaagccattcatgagggatctgcccccgtgatccaaatacccctagcaggccccacctccaacattggggattactgtttcaacctgagatttgggtggggacaaatatccaaactatctcaccaaccaacccctaactgtgatcactgcaaataaaccccagtaacagaaaaagcagtccaatgaaagatataacaatttttctatttcttctgagtttagaaaaatgagctagaaatttggtgtgtgggaaagttcgtctaaagtcttgtatatgctcaagaatgccttgtctgtgagtgtgctctataacatttcgagaaactacagaaggaaattataacgccttttcccatgaaaactgttaggaaaatggggccaggagcagtggctcatgcctgtaatcccagcacttcgggaggccgaggcgggcagatcacgaggtcaggagatggagaccatcctggctaacacggtgaaaccccgtctctactaaaaatacaaaaaattagccgggcgtggtggcgggcgcctgtagtcccagctactcgggaggctgagacaggagaatggtgtgaacccagcagcgggtgcttgtagtgagccgagatcgcgccactgcactccagcctgggcgacagagcgagactccgtctcaaaaaaaaaaaaaaaaaaaaaaggaaaatggatgccagttgacaggatcaaatttcgtatttgtatacttggtagatttggaactctaaagtagatcctatgaggagacagataattgaacaacaacaaccaaaaagtaaaaaaaactctgtgtcctagatgactccatgaaatgtaagtcaagcactatggtataccatatttaccctaacagagaaacactcagaaacctagccggttttttgagggaagaactatttgtatagaaacctggaggtacaaaccatttagtaggagaattgtcctattgtgccttcagccacatctcatttaaaatcgtaagtaaagaaagttctagagcctgtagtaaaaatatttattcaaatgtaaattcatttattcaaatgcattttatctaccctttccttccatccggcaccttctcaaggacctctctagtatagtattttgggatcttgaatcagctgctgaccatggctcttagttgcatagagacctcttgttgtaaacgcatttgcttgtcgtggagcttaacatttattatttagtaagcaaagatagacatgggttcaggatcctgcagaaattaaacagaggtccttgaaaaacttgaatgtgtcctgcttatcttttcatttctccttttcctgggttttcactgatatccgtatgggaaaaatatagctatattttcctcttgtattctccaagcaagtactgagtagcccagattcaccatttgacaggaaacagtgtcatcaccgtaggcagatctaataccgatggaaaagagctgatgtaatttaaatgctctctgtgatttctggaagtctttacagaattgttttgtattgtaagagccgccaaaggcagctgtactaagcaacatttaacagagtagtaaaatgcatttcagaccaggaggaattcagccatgctagcacatggcaccttccacgctgaaaggcaaatcacaatcagaataaggcccacgaagtttatttcacctactgtgtttgcaactttgccaaaccgcaactttaacagtgacatagacatataaatatataatgtacatgaacaaatgaccagtaaactttgacatctggtttttatcttaagtctgtttctttgtcttgtcactgtggaaaaaaacccggaaaagtcttgaaagctaattagctccaaatttattttaggaatgaagggccaaagagttttgatgacaaatttttctttgttgcagctgccaagctggtctctgacccctcaatttaatggaagtgattatttatttgcacatacgtcctttgtttttttcaatacagaactctctttcctggaaataggcacctagcttctaattcccatttgcaaagaatttgctgtcttaaacaagctttaaaatactgtactaaacatctctttcaatatattcctttattaaactgatttctaggctttatcagagggaatgtataataataatatgtattgttttttgagtttacattttccttcaaattaaaaaatttttttcttataagactaatttcccacccagtttacatattcttagtgggtgtgcatgcaaacacacacgtatgtacacatatacacacacagtttatacattcttgtctttttcattatatttatgaatatgttattttggtataggtgtaaatgaaaagttattaatttcaggttattgattgtctattattttgaaagaccaaagtttgacttaattccacttatcataatcacaaaacttctggtgggctatctcatccttttaaagcagttaaatagcttttatataaatatgaatatataatatgtacacaaatgtatgtacccatacatatttgagaaatatatataatacatatggcatatatatgaaagcaccactgaatcagacacattatatacatttctcttgattttagagcaaaaagcgtttagggggaaatgtataggctgaagttaaagatttgggaactcagtggtcataaagttgctggtctaatgatgtcaatgtcagtcctccagcctaatgggaaaggtatggagaaccccttagctttcttctcaacagaacttgtctccttttcctcctctgcacactgtgagactttgtaggacttagaaggctatgtctgtgaatcagccaggaaatagatctctctgctgggcttaatcaacctctgctgcccttaggtcttcgcagaggtcctgggattgcaggttctggacctagcccaaggaagctcagtttttccttgccaaaatctacgcaaataacatccagaagtggatcactttttcttttttttaagagcatgaatttaagtgtcactcattctcccatgtaaacattggcataaatagctgattttatccttgggatggcatagtctatcccacgactgccaaaagaacctggaccctgccatggtaaataaacccctcatcttgcccaagaagaaggacatttatatggttataaatacctacattttattacaggcttaaaatttgatacaaaatgtaaacattgtgtttggcatagttgggagtaaatttacattgctaatggttgcaaaacaaaaataagctttagttagcaaagaaaactttaataattctattgaaaataaattttactgctatggcaactgtagaacaaagataataaacaaaagataaccatggcgtgaaaccatatcacatttgtgggccatgggctgggagattgaatccttagtacttcttatgaaaacacagtgcttcagtcaatttctggatcttactatcggcatactgttatgaagacacattattctgcttagtctgcttgccttttagtgaacttagttatattcatgtctaaaaaaacctgtaaacttattatgcatgactcattttttcatagtcttcaaaatgattgtaaggatagataatgatctagtaaactaatgttacaattaactattaatcattggctatttagatttatagtttcacttttgtagtttttgcctctattgacatattttctaaggataaatttgtaggaataaaattcttgtgtgaaggggttattgatatttatttttcttttcttttcttttctttttttttttttgagacgaagtctagctctgtcacccaggctccgcctcccgggtgcaagcgattctcctgcctcagcctcctgagtaactgggattacaggtgctaatcatgcccagctaatttttgtatttttagtagagacaggggttccaccatgttggccaggctgacctcctcaagcactcctgacctcaagcagtccgaccatctcggcctctcaaagtgctgggataaaggcgtgagccaccacgcccggcccatttatttttcttatttaaacattttcttcctttgacttgtttgcttgtgtttgttctcagtttttagaatcattaaacattttggccatatagaaaaatatacagaagcctggccgggcgtggtgactcacgcctgtaatcccagcactttgggaggccgaggcgggcggatcaggaggtcaggagatcgagaccatcctggctaacacggtgaaaccctgtctctattaaaaatacaaaaaattagccgggcgtggtggcgggctcctgtagtcccagctactcgggaggctgaagcaggagaatggcgtgaacccgggaggcggagcttgcagcgagccgagattgcgccaccgcactccagcttgggtgacagagtgagactccgtctcaaaaaaaaaaaaaaaaaaaaaaaaaaatacagaaggcttttattttatttatctttacgaccttttcccctgttgtttaggcacttgtgtgagctcaagaaacatctaatgaatcaaaagatagtcctttggtgctttagaaatgtggttttgagattaagtcaaatcaataagtctttattgagcgtgtgttaagtacaatagcacagaccaaagcgcaaagagattctggggatttcgacttatgagttaattcaggctccactagggcagaagctgttgttcacttttctccttcttgggtgacaggtgggtctgcatcacagctgctctggaggaagagcagccatctcttcctgctgtcaccattgccttggtaggactggtgtgtgtatgggtgtgtacttgtctttcttaacctttcacttttgaagatcttccttcttcatcttgtcctgccctctggaaggtgagaagttgcttgtgttatctccatttgtgtgcagtctaaaatggctacagggcattctaagcaaaggggctcgaggaggagatgttggatatctcaggagaagaccctgaagaaatcccttctccctagaggaaaaaagtcgcgggcagcaatcgagatggctctaccgaataaagcagtttttagtcaacttctaccacctagtggccatttctgagaggctcttttcccctttatttatttttaaaagtattttgacatatgcaaagacatttgtatctgtcaatccatgttttctttaaaaatgtcaagatcaaaataacacagtgtcacaaagagaagtaatcattgcaagaactaaaacccagagatgcttaaagatggttcttgggcaaccacttatattttagtttgttcccttcagtcctatttgaatttttaaaattctatttgaatttttattgtcacatgtgtatgatacttttataatatatattttaagtttttaaatttataaaggtctttttaatatataaatagagccgggcaaggtggctcatgcctgtaatcctagcactttgggaggccaaggctggcagatcacctgaggtcaggagttcgagaccagcctggccaacatggtgaaaccccatctctactaaaaatacaaaaaattagccagggatggtggtgcacgcctgtaatcccagctattcggggggctgaagcaggagaattgcttgaactggggaggcagaggttgcagtgagcagagatctcgccactgcactccagcctgggcgacaaagtgagactcaatctaaaatatacatacacacacacacacacacacacacacacacgttttgaggggtgttaatttctggcaattagtgcaaaaggtgtattaaatatgaatgtgaaaaaagtttaaaaggaaaaattttaaatgtttgtttttcagataaccttatataacatgggaaataaacattacttaaaaatttacttcatttgctcctacttcaccaaatcaaatggtttccatttctcaggttgttttcattcattgatcgatatgcaaacgtagtttttctctcatatataacagtccatccagattttctgacatgggatcagaatctttaaatgcttcattatagaaacatcaccatctacaagggggcatgagtgaaatcagtagaattttctttgcttgagatctcttttgccagaagggcaagtggcttttgtcaaatgaattgtgttttgatgaaacagtgtagctgatactcagaagcctggagcaaaccttctggtacaggagagggcccttctgttgtgtaagttttgcagtagcacagactgcatttttagctctgacacagtcttcgtgattttggacaaaaactagactttcagactcgattccttggtgcattagtttgctaggactgccatagcaaagtaccacagactgtggcttaaacagcagaaatgtattgtctcacagttctggaggctggaagtctgagatcaacgtgttggctgggttggtttcctatgagactgcttctcttggtttgcaggcagctgctgtcttgatgtgccctcacgtggtcacccctcagggtgtgtctgtgtcctgtgtctgtggcctcatctcctcttcgtatacgaatatcaatcatattagattagggtccacccttaatgacctcattttaacccaattgcctccttaaagatcctatttctaaatacggtcacattcagaagcactggggcttagggcttcagcacttgaattttggaagtcacaactcagctcatagtgcctggcttgggaatatggctaataatttcgcctggcagaattgtgcagttgtgaggtcatgtttagaaaactcctggtgtgatgccaaggtgcacagtagctgctcaatgaacaagctgttattcctacttcagtttggattttgaatatcagatttccttaaagtgaggagcccctataacagaatccagggatttttaaaatattggatcaaaatgccattcagtcaactaggacctgacactaatctatctcattgcatcttctctggccttcatgctgcaccaagacactgcacgtactaaatgctccacttttaggaatgcttaattgtcctgtctgggtccactcactccagttactccagctcaccctgggaggcagtaagccatcccaagaaccatggttaggaccataggtcctggagtccccaagatgtccagctccattgcttacatcctagacataggcatggtatttaacctctttaaagcttcagtttccccatttgtgaaatgggggtaattgcatcactactaaatctgtagcattcttttgagaactgaaaaaaatggtcaaagtaaagcccttggcataatggtaacagacaatagataagctcttaattttaaaaaatgtttaaaaattttttcgagacagggtctcactctgtctcctaggcaggagtgcagtggtgctatcacagctcactgcagcctcgaactcctgggctcaagtgatcctcccatctcagcctcccgagtagctgggactacaggtgctggcaccatacctggctagtttcgttgattttaattttttggcagagtctcgttatgttgcccaggcttgtctcaaactcctgggctcaagcgatcctcccgcctcatcttggtttcctgaaatgcggggattaaaatataaaccaccgtgtctggccggtaaactcattactgttggcttttattatgatttttatttgcctcccagtacctaggtatttaattataagaggaatgccctttcagaatccctgtcatagtattgcagttagcagggctagctccactgcattcctgagaagtgatgcttgggaggctgatatctctcctgcatcctgctgctgccctataaaggaggagggcagtggggctcaactcccagcctgcacacctcctcctcttccttagcttgctgatctttctcttaagggctttttcctccctctgcctaccccggtaatgactaccctcttttccattttttttaaacttttattttaggttcagggttacatgtaaaagttcgttacataggtaaactcatgtcacagggttttgttgtacagattatttgatcacccaggtattaagcccagtacccaatagttatcttttctgctcctctccccccacccaccctccaccctcaagtagacaccagtgtctgttgtttccttctttgtgttcataagttcttgtcatttagctcctgcttataagtgacaacatgtggtatttggttttctgttcctgtgtgactttactaaggacaatgacctctagctccatccatgttcctgcaaaagacatgatcttgttcgtttttacggctgcttagtattccacggtgtgtatgtaccacatttgctttattcaatctgtcattgatggtcattcaggttgattccatgtatttgctattgtgaatagtgttgcagtgaacattcgcgtgcatgtgtctttatggtagaatgatttatattcctctgggtatacacccagtaatgggattgctgggtcaaatggtagttctgcttttagctctttgaggaatcgccatacttctttccataatggttgaactaattgacactcccaccaacagtgtataaatgttcccttttctctgcagcctagcagcatctgttattttctgactttttaataataaccattctaactggtgtgaggtggtatctcactgtggtttgaatttgcatttctctaatgattagtggtattgagctttctttcatatgcttgttggccgcatgtatgttttcttttgaaaagtgtctgttcatgtcctttgcccactttttaacggggttgtttgtttttctcttgcaaatttaagttccttatagatgctggatattagaccgttgtcagatgcatagtttgccagtattttttcccattgtgtatgttgtctgtttactctgttggtagattctcttgctgtgcagaagctcttaagtttaattagataccacttgtcaatttttgcctttgttgcgattgcttttggtgtctttgtcatgaaatctttgctcattcttttttttttttttttttttttttttttttcagacaaagtctcgctctatcgcccaggctggagtgcagtggcacaatcttggctcactgcaacctccgcctcctgggttcaagcaattctcctgcctcagcctccagagaagctcagactacaggcgcacactgccacacccagctaattttttgtattttagtagagacggggtttcaccatgttgcccaggctggtctcaaactcctgagctcaggcaatccacctgcctcagcttcccacagtgttgggattacaggcgtgagccatcgtgcccagcctctctgcccattcttatgtcccgaagggtattgcctaggttgtcttgtgggatttttatagttttgggttttacatttaagtctttaatccattgtgaattgattttgtatatggtgtaaggaaggggtccagcttcaatcttctacatgtggctagccagttatcccagcaccatttattgaataggaagtcttttccccattgcttgtctttgtctagtttgttgaagatcaggtggttgtaggcatgcagcattatttctgggctctctattttgttctattgatctatgtgcctgtttttgtaccagtaccatgctgttttggttactgtaaccctgtagtatagttcaaagtcaggaaccataatttctctggctttgttctttttgcttaggattgccttggctattcaggctcttttttggttccatattattattgttttggagtctcactctgttgcccaggctggaatgcagtgtcacaatcttggctcactgcaacttctgcctcctggtttcaagcgattctcctgcctcagcctctcaagtagctgggattacaggtgcatgccaccatacctggctaatttttgtaattttagtagagacggggtttcaccatattgtccaggctggtctcgaactcctgacctcaggtgatccacccacctcagcctcctaaagtgctgggattacaggcattgggcactgcgcctgaccccatattaattttaaagtagtttcttttttctagttctgtgaacaatgtcattggtagtttgataagaatagcattgaatctgtacgttgctttggattgtatggccattttaataatattgatttttcctatccatgagcatgggatgtttttccatttgtttgtgtcttctctgatttctttgagcagtgttggagatctctcacctccctggttagctgtatacctaggtattttattctttttttgtggcaattgtgaatgggattgcctttctgatttggctctcagcttgactgttgttggtttataggaatgccaatgatttttgtacattgattttgtatcctgaaactttgctgaagttgtttatcagctgaagggctgagactctctgcctaattataaccatgttacagtatctgaaagaaccttctcttggctgggtgcagtggctcacgcctgtaatcccagcactttgggaggccgaggcaggggaatcacctgaggtcaggagcttgagaccaacctggccaacatggtgaaaccccgtctctaccaaaaaaaaaaaaaattagctggacatggtggtgggcgcctgtaatcccagctactcaggaggctgaggcaggagaatctcttgaacccaggaggcggaggttgcagtgagcagagatcacgccactgtactccagcctgggcgataagagcaaaactctgtctcagaaaaaaaaagaatcttctttttctcttgctttccattgacaattcctccccacactttccctcccttctctgcaaaacttcttgaaagagtagggagtatgctgaacatttgcttctgtgccatccatatcctccttagcaccttcaccttttcagcctgctcctggaattctacctgaaacagctcccttgaagcaattcttctcttttgccttcctacttgttctgtctttgcagtttttattgcccaatatctcccccctcacccactttttttttgagacagggtctggctctgttggccaggctggagtgcagtggcgtgatcacagctgactgaagccttaaccttctgggtttgagcaattctcccatctcagcctcctgagtagctgagaccacaggtacatgccactgagccaggctagtttttatttttattttttgcagagatggggtctcctacattgtccagattgttcttgaactcttggcctcaagcaatcctcctgcctcaacctctcaaatccacagtgcccagtcccacatctcctttttgaaactatttttgtctggttttcatgactttgctctggattgtcacaagactagtaaacttccgcagatgtctctaagtctctaacttgatactacacttctggagtgtggcaggacctgggacatgaacccagcttagacacagggaggaagttggtgtaaagaagggaacgggcacaactggagccaggggcctgattgggaagacttcttgggagtgctgccttccctctgttctgcttctcttcccatctcttacatctttttcttgcttgcctttctgatccaacttcttaaagttagtaggacccaagtttcagtgttccattcccattcaaccttcttatcccttctaatacttcaatgatcatatctacacagataaatgtctcttgacctttctcctgaccatcagcccatcatctcttatgacttgctagggacttccaaccacatccatcccaaatctcaaacttaactttaggggtgccattatttcttcatactgccttgcactgtggtcctttcctctcaattccttccactccaactcccttccactttcccaccacctctctcctgcttcccacttccagtcctcccaacccgtacctgggctcctcatcctgctgcctctcttttccctcagagtcatctttccccgaaagcctagttggtacagattccccgctgcttcagaatctttaatggccccttcttggtgatgagaaaaaagctcaaccccttagttagcctggcattaaaggcctttcacaacctggccttcaccttcatctctgaagtcgccttctctggattctcgccaagatgagctgtcagctgcaggttgggggttctcttagacaagccatgtggcttgactctcaattttcctcttgcctgagagactctccctgtcttctctcctctttcacaaagaccacctgagcccatagtggttttctgcctcctccgaagttctaagtaactttaaaaaatgtgtctctgtgtactccccaaagagccaagacccctgcaggcagaacctgtattttatttgggtgcagaaagtttgctgggcaatccagtcctgttggatgcactgcctgttactagccatgctgtgggcaactctctgcatctcagtttctttggtttattataaaattggaatgattccttcctgctttcccaaatgttggttgtaataatcaaaagagcaaatggatgagaaaatgctttgaaactctaataataagcaatgtcagatattgtcagttttcctttccaatccctggcttgtctgtctatccgtatccatctttcttactataaacaattaagtgtaaagcagacttctcagctttaagctttgcctggaaagaacaattgcaaagggctatcactccttaagccccaggacataagaagattaccagctgggcacagggagctgggatccttctgccaggctgcttagatgatgggtgcccggaggagcaggtacttaccatctgtcaaggcgtctggctcatgctcaagaatgcagctcagtttctcagctgacaacacacatctgacccaaggtgtgaagctcaggatctcagacatgtgtgatccaggatgattcacttccctgtatggtcctgtgagaacactttcgccttacgcattttctattactatcatggccaccagtggaatgcagatatttagtctctgctcactccatttgccaccactgccaaatggccgatgctgctgagggctcttctcaaactggcaggtgtgttctccttatcacctgtctcatgtgtgtttcattttctcttctcaatttctccaaggttaggattaaaaagaacacatttatttatttatgactttatttagatagatacagtgctgatggtgtgcaagccaatttcataggcttattcttagttggtccttattgctgtgaagttcactgccttaaaatttaaaatgtgaggaatcacaggaagtggaagaaataattgcacctgggatcctgaaccatgtcactgcagacctgcttacctactgccttattgcatgtcctctgttacgtgtgagccagtctcatctattcaagtagcctgttatttttttgaattgatagactttattttttctttttatagagacagagtctctttatattgcctaggctggtctcctggacacaagtgatccttctgccttggcctcccaaactgcggggattacaggcgtgaaccaccgtgcccgtgtccgaccagtagactttattttttgagatggagttttgctcttgttgcctgggttggagtgcaatggtgcgatctcggctcaccacaacttccgcctcctgggttgactatttttaacagcagttttaggtttgcagaaaaactgaacagaaagtacagagttcctgtatactccctccccttctccacagcttcctctattattaacatcttgcattgggttgcacattttttacaactgatgagccaatattgatacattactataaactgaggtccatagtttacattagggttcactcgttgtgttatacattcaatgggttttgccaaatgcataatgtcgtgtatccactgttacagtatcctgctgaatgatttcactgccctaataatctcctgcggtctgtctattcatcccttttcccttctctttgccgccaagcaaccagctaatttttgcatcccccgcaatgcctagcactgcttgtgtatccaggaggtgctaattaaatgcataggttggttgatggcaacagtaaccaaagagatgaaaccatggatttaatgtctatgagaatatcaacacatagtcttggtgtgctcaggcagcgcttctagaaccatcatctgtagcaaatcatgggatgttccaaatcagctcttcatgagcaggaaggtggaaagcctctggattaggacaaaatcttctcaatgagtgaagtgctttagtcagcgtctcctgggaagggctatggtttgatcacggtgtgcagctttgctgtttcaagggccctgggggcaaaccagtcagatgagcttctggcattgaccttgtgcaggaggggcagctggagctgtgggtgagtgcacatttcattgggcaagtgcttttgcaagaggctcaagggctgtcggtgctattcgttccccaatagtgttagctcattcaatgtcatttcctggaagacaggtaaagaaaatagatgattttgattgttagggagaatgacttcctttgaagaatgaatggagaaaaatgccttcctgacaagatgataaaacctctttataatacttcatgcaaacttcgactaaatcatcttatttctcagttggggaggtgaaatgaataatagcagaataggggaagggaagatagaaactagcaatgattgagggttgctacatatgaaactgttcaaatgcattatgtcattagagtcagttcttgccatatatgcctgaatggaaagaattttgcacagataacttttttgaatgtctatttggctttagaattcacattcagttgttttgatagaggggtaggcagctgcagattgacctttccaaatccatgggaaccaggctggtgataaagtcggctgtcaatcactaagcaaagctcggcagatgggtggtggaagatgacctgggagcaaggaatatctttggtggatgacatgatttggctgtgtgcccacccaaatctcatcttgaattgtagttgcattaatccccatgtgtggtgggagggacctggtgggaggtaattgaatcatgggggcagttacctccatgctgttctcatgatagcgagttctcacgagatctgatggttttataaggggctttcccaccttcactctgcacttctctttcctgccaccatgtgaagaagaacatgtttgcatcccctttcatcacgatcataagtttcctgaggcctccatagccatgctgaactatgagtcaattaagcctctttcctttataaattacccagtctcggacatgtctttattagcagcatgagaactgactaacacagtggaattgtaaactgtttccagtggtcatcactggtcttcagtctctgttctcacatgctgtagcatggcctcagggatgtattctcatcctcttctacacccttgctggagcctcctcacctgagtggcctcaggaacgggtaactaccaatcaaatgatatattgaaaggttaaaaacccagaggctaaatagatccctggagattgaaaaaggaagttgttcaatattgcctcaagattttcatgatgtactttcagacccctaagtttccttatgtaccacatatacatacacttcagttcaaactctggctgtttagaaggctagttgagatgtaatgacttcttgttctttgagaaagcgcaaaaagctgactggagtcagagcaaaagaagtagtggttgcttttctcaataggcaaaaggtgaagggaagtggtaatcatattctcagaggtttcaggccaaagacttggagatggcaacccattgtgaagagagggtcaggtaacaaaagccttcaaaacctgaccaagatgattaaagtaaaaattccttagccaccctccccacccctatgcatcagagctgagcctcagacactgaaggagggcagcctggaatccaggtggctccccaaggtcagttcctcacaccagtgggctccatgctctgttcacacattaataaaaagaatatgcctctttagtacattctttcttttctttctttctttctttctttctttctttctttctttctttctttcttcttttctttctttctttctctttctttctttctttctttctttctttctttcttttcttttcttttcttttcttttcttttctgtctttttttttttgacagagttttgctcttgttgccaggctggagtgcagtggcacgatcttggctcactgcaacctccgcctcgcgggttcaagcaattctcctgccacagccttcctagtagctgggattacaggtgtctgccaccacgtccagctaatttttgtatttttagtagagacggggtttcactatgttggccaggctggtctcgaactctggacctcaggtgatccacccacctcggcctcccaaagtgctgagattacaggcatgagccaccatgcccagccctcatatttcttttaaaataaattatatacattattttaaattgtaaaaatccaaaaagccaaaaatttttaaaagaatgagataaacagtatctttcaaataatgaaaaaaaaatggtatataatgttagatttaggcttggcttcatataagaaaaaacaactaatggtggcataaacaaggtaacaatttttctctgtcccataaaggaaatctaaaggaaggcaatccagcagggatatggcaaccccacaaagttgtcatggaaccagactaattccagttatctgctttgccattactaagctgtggctttgtcttcaaggttcaagatggcgtctagagctccagccattgtatccatagtcccagatgcctgatgaatgaaagaaaagtctcctcttcccctttaagatttctttaagtcccataaaacattttgaaaccagattggaagtcttttaaccttctgattccaacctagagcaaggaaatcccccaaggagtgctctaccatgtgaaatcttctcttccccatgttgtcatgatcctgccctcatgtgctctgactattgccaagccttggatttcatttctggaataatgccttgctcaatattagaaccactttagttaggatttgggggaggcagcatgattgaagaacgtgagtgctgttgacgacagtattgttggtgaaagcagctccagttccacaacttacgatctgagacatcgtgtggccattcatgtacaggctttcagaactgagagaactttggtagactaatcaagatgagataggttatccggtggcaacaaagatacctacgtctcagtagcttaattcaatgtatgcttccttttctcttgttcatgttttatgttttatagaagtttacaggcaagatcctactcacagaggctcttgggatcaaggctgacagaagctccatctgaagacttttatactatagaggcagaaaaagagtgatgaatcaagcactggcttctaaagcttccgcccagatgggaagcatatctcctctgctcacatttccctgaccaaagccagtcacatggccatcctcagcttcagagaggttgggaaggcattcccactatgtgtctggatgccagcaactcagaaatatttggtgagtgcctctgtggctactggtagtttagttcttatgcctatgttccagttttgtcctctgaaaggccaaatctgaaattcaaaatcttacaaacaggtttatacttgaaaacgggtaaacattctcataacataaagcttaataatattcatgagcttatttttgcaaactctgcatcacaccgaaaagagaagttctctggcttcctcagctcaggggctgtctcattacttggtccctaagaccacagctggggactggttctacctactatggaagtttcaccagccaggacaaaataaaaaagaaaggaaaaaccaggataaatgagcttttgagaaagcaaaattcactgtttttaaggaactgtcctagcttctatcacatatgtattatttttttgaggttaaaagaaggcttttctatatgaaatagtggcgatggtagttggtagaagttttttttttttaaagaaatgtatggctgggtgcggtggctcacgcctgtaatcccagcgctttgggaggctcaggcaggcagatcacccgaggtcaggagttcaagaccagcctggccaacatggtgaaaccctgtctctactaaaaatacaaaattagctggggatggtggcgtgtgcctgtagtcccagctactcgggaggctgaagcaggaaaattgcttgaactcaggaggtagaggttgcagtgagccgagattgagccattgcactccagcctgggcaaaaaagagcaaaactctatcttaaaaaaaaaaaaaagtaaatttacttggcaaaataaaatgttagtgtcattatatatctcaccttcttgttttttcttaaatttttagcaaccagccatgaaacaaaagtttaaaagccactcatctggtttcccctttgttttcaaagaaggaagctagaaaattaagtgatgtatccccaaacacacacatttaattggagaaagaacccctaatcaattcttgaattcaaatttcaaattagctgaatggcatgaacctttcttcccctggaatagccttacagagacctcaccattaacagcatctgcaagagaagattaaagcacacgattactttactcactgtgtaacacatgaggaacatggacgagatgggaaaaaggtgagtggcttaacgtcaagcacttcattaatgagatgaactcctgactttggacagtggtccacttacagacgctgtctttgaaactgcctgcagagcctcctgagatcttctaatatggctgttgaattggggcatttaaaagcttctgatggttgcaatgtgcatcagttttgggggacagggaggtcccctctctctcattaagaagacacaagccaggaatttatactgatcagacaacataaaaatcagctgtgagaggattgggtcagaaaaccaatgaagagaggttggccagaagattaaaaatcagaaaaagaggcttgaaattgctgagctttctaatgataataaggttgccacctattattatggccactcatgttgtccccctgtatatgagagctgtgagagtaacaaagtgttacgtgtcaagggtcacatgtgacaatcaatgtgaaagatggaaagagagggctggtgcctatcacctaggaatgataggtgatatggccgaggtgataaacagtgagaggggggcgagtgtctcttcctcggtggaagttggagtaaatgtagacacggatagagaacaaagtctacttattcaaaaccgagcagccaggggaggagcagtcctcccacagtgaactattgaattgtgaataaatctctgactggagagattctgagtcagggggattagctgttcctatattacatgtggtaaactggcagaaacaggtttaaaccattgagtggtaggtctttaggcagagtaaaattaatgtacccttccttaatggctttggctgtttgaccatgtaaacgcattttgagtatcacatctctagcggaggctaatcactgggaggtaaagatgaccacaagttgcaggcatctcgggatcacaggtctagagcgggagcctgcagcctctctgccagtttcccatgaattatctcactattgtggctttaagacaatatgcactgcaaaaggaaggttatttacattatatatttagcctaacactaggataacatcctttggcatggccactatctgatggtatttgaaactgaaccaacttcctatttccaggcattaacaaatgagagtcttcatgttgtctaatgttatttcctgagtttaagactgatttcttttctccaattcattcacatttctttaaagaaaagatctcctttaaacaattaaatttcccagaattgtttgagcattgttattgttctcaatgagaatatttcctatttaactctagttatgtaacttgatgggaattttcttcagtatctatcattgccatactcagagaatttgcaggacacttgacagataaatcaaccagcctgtcaagagtcagaatcttaatttagatcattcattccaacaagtctctgggcagacaggatgcaaaaatgaataaggcatggcatttgccctcaaacagcttacaatttagaaggggagatgaaaaggaacattgattgtatataaagcatgattgtcatagcccttctcctgtctcatcttcctctgggaataaaattaagggaagggggagagaatattatgcatgaaaacacagcatacttatttgctaagtataagtctcattatatgaatggagagtgacagtttgtactcaggcatcagaaaatgccattttctctagtgagagaacagtatatgattgtgggtaggaatatgggctctatagccagatttcctgggcccaaatccctgctcggccacttactgtgtttgagattttgagtaagttctaaccttctgtgcctcagttacctcgtctagaaatggatatgaaaccaggttattgtaaaggtgaaatacctttaacaagtttaaattgtatagaatagtgtctgtcatgttgtaagtgtccatgagttattattagtaaacttctaagagatttccatattcttaaacacaatttttggtagtgataatattttatttccatttaaatgtggtaaaaaaaaacccatcatatttaccacgcttatgtgtagaggtcagtcgtattaatttattcacactgttgtgcaatggatatttagagcttttttttgagacagagtctgtctctgtcaccaggctggagtgcagtggtgggatctcggctcactgcaacctccgcctcccaggttcaagcaattcccctgcttcagcctcccgagtagctgggactacaggcgcgtgccaccatgcccagctaatttttgtacttttagtagagacggggtctcaccatgttggccaggatagtcttgatctcttgaccttgtgatctgcccgcctcggccttccaaagtgctgggatttcaggcatgagccaccatgccccgccctttagaaccttttattttacaaaactttttaaaaaggatactctgtatcctttaaactacacctcttcattttcccctttcccagtccccagcagccatcagtttactttctgtttctaggaatcttactacttagttacttcatataagtggaatcatatagtatttgttacctggcaaaagagttgtacattttacttcctctgagctcctagattctggctacaatttcatacctctagtatttcatgttcattgactgtgtaaatgtaatctgtagatatgcataatttcaatgcaacagagcaactgctgatcctgctagtgatgcaaagattctaggctatgacctcagattgtgtcagcatggcattactccatttccaatctcatgaagactttggtagtattcacaagaaagagttgtccagtaatttaaatttaaaagattgatagaacaatcatcccttcatcatttgctctttgttatcctctctgtggacaacctttacatgtcttagcagccagaacttagaagcagagggaaactatagatgtcatttgtttatttgcaggcagcaggattcatggtgtctaatcttcaccatgacatttaaagtaggcacatttggggatggctgtccaaagtgatggtctccacttgcccctcattcagggttggtttcctgggggctatgcttgtcttgtgttcctatggggtccacttcttcagttacacttgatgacctgagagagggacccccgacctactgagctcactaggatcttgctcctaaagatccagaatcggctccaagagggtcgagctcttcatgtggctggattacaaacaggtaaacttggaagcaactggaagcagatgtgcagaaaaaagtagggatgagcaagacttccagggtccttctggctttccagagctggctctagtgtttccagaagaccagcttccttatgccttcagactccatgaaatgactcttgtttcctcaccaaaatttgttttacttcagttagagtatattggttttggttagttgcaattaagagtgctaattaatacagcattgtgttggaatgagaaagctgtcaaaaaactaaaggaagactgctatagtacccacaccagagatttggagttgggaggtttaccagtgagggatcaattggagaaggagaaccactataagtattgtggaataaggaatgtattacaggaattagacctcacacaattgtgagaaaagctggagaagcagaagtctaaaaagggagatgaaggatctgagaaaggtgtttaaccagccctgtgtgggtgaatgagttggggcttacagaaaatctgggagctatgtatgtacagctgttggaggaggactgtaaaggggctggtatagacatctacagaaggttgatggttctgtgtctacttcctctgtgaatgtgcagacaagcatctcatagggagcctggggctgctattggtccatagagctagtagttgaggaggagacctgggcatggaatagggagagacagggcaaactggaaaccaccagcacctttgcatctgtctctgactgtctccaaccaacagtaaccttagaacaaaatgactactgctcactgccacctcccaaatattattcttttggccaagtgtagctgggatccattcagggaaggtgattctgcaaaacatagttcccagaataatcaaggtgaaaatagaataatcttgcacacaggtctttgataagactaggaatatataatacataacagctaggaaaaaatatataaattttccccaagtgcttataatgaacaaacatatttgggaaccatatccacctagcctagtcaactaaattaaaagctggagtcatcttagatgctttcctctcaattaccctcaacatctagttaccaagtttcatataattttacttcctaagtgtctcttgaatatggccccattttctccctttttctctcactctctctcctctcattttgacacaaggtcttactttgtcatctaggctggagtgcattggcgtgaacatggcttactgcagcctcaacctcccagactcaagtgatcctcctgcctcagccccccaagtagctggaactacaggtgcatgctaccatacccagctaattttttttttgtagagatagggtttcaccatgtcacccatactggtcttgaactcctagactcaagcgttccacttgtgttggcttcccaaagtgctgggattacaggtgtgagccaccgcgctcagccagccatatcttctctatccttgttacaaatgcttatggtgtcttacctggaactcctacctgtttcctaatcagtctttctgcatctaccacaaatctgtccatactaccactacagaagggggtcccaaccctcactgtgctttagaatcacctggagggcttaaaaaaatccattgcctgggccccactctagaccatatatcggaccctctcacagcaaccttctatggtaccaccattacctttgttttgcagatgagcagactgagacttagcagagggttaaataacttctcaaagtccacagctaagaagtagtggagcttggatatagtgccgttatctgagtgcagagcgtatcctcctaaccacatagtatgatgccttccagactatgccacagggctaatgagatggttggtaggaccagtagtggaggtatggaacacaattagaagtacagaattgaggggaaaagaatgggaatggttttcaatttggttggtttgaatggattcttagacaaccaagtggtgctgttgagggggcagttggaaatacaatgaagctcagtctaatttagggctagtgagggatggacaggaggaaatggatacaaaagacaattctgaggtggaaaggacaggatccaatggctgaatgaaagggcgaaggtgagcggggatgtaggattggctgggaggagaagaagagagtaaagctatcttgaagaaaatttaatacaggaagggcagcagttttgggaatgtgctagagaggactatgagaataattttggtgatattaactttgagaacccagcagaatctgtaagttggaaatatgaatctggagtttgggagagaggttgcagtcagggattctgattgaggttgcatcgggtggttgaaaccctggaagtggatgagagggatgagtaaggtcaagtatgagggatgctcaagaagagaagcaagccatggattaaattctggggagatccaagataaggggtggggagaaggggagaaactaatgaaggggacccaaagaaaggagtgagcaagtgggaggaggacaggaagacagatagatagatagacagatagatagagaagacagaagagaaagagagagagaggagaaagagagaaacggagagagataaagagaggagaaagagatagagagaagaaaaagatagagaaagaggcaaaagagagaaagaagagaaagatttattttaaggaattggctcacttgattttaaggtctagcaagtttgaaatttgaagggcaggctgctaggctaaaaattcaggcaggatttgaagcttctctctctctgtttctctctctctttaggcagggtctcactctattagcctggtctcactctattaggctggagggaagtggtgcaatcactgctcagtgcagcctcgacctcctgagctagagtgatcctcctgcttcagcctcccaagtagctgggactacaggtacaggccactgtgctggctaattaattttttttttctttatagaaagggttttgacaagcaatgggtaaagaatttcctaaatggtgatgggataactggctagtcatatgcagaagattgaaactggacctctaccttacagtttatacaaagttaactaaagatgtattaaagacttaattgtaaaacccaaaactataaaatccctgcaagacaacctaggcaataccattcaggacataggcatgggcaaagatttcacgacaaagatgccaaaagcaaaaattgacaactgggatctaattaaactaaagagcttctgaacagcaaaagaaactatcaacagagtaaacagacaacctacagaatgggaaaacaattttgcaaactgtgatctaacaaagatctaatatccagcatcttataaggaacttatatttacaagaaaaaaccaaacaaccccattaaaaagtgagcaagggacatgaacagacacttttcaaaagaagacatatatgtggacaacattcatataaaaaaagctcaacatcactgattatcagataaatgcaaatcaaaaccacaatgaaataccacctaacaccggtcagaatgggtattactaaaaagtcaaaaaataacagatgctggagaagttgtggagaaaaaggaacacttttacactgttggtgggagtgtaaattagttcagctattgtggaagacagtgtggtgattcctcaaagacccaaagacagaaatattgtttgacccaacaatcgtatgactgggtatacacccaaaggaatataaataattctattataaagacacatgcacacacatgttcactgcagcactattcacaacggcaaatatatggaatcaatctaaatgcccatcaatgataggctggataaaaaaatatggtacatatataccatagaatactatgcagccataaaaaagaatgagatcatgtcttttgcagggacatggatggagctggaggccattattcttagcaaactaacacaagaacagaaaaccaaacactgcatgttctcacttataagtgggagataaatgatgagaacacatggacgcatagaggggaacagcacacactggtgccttttggagggcggagggtaggagaagggcgaggatcaagaaaaacaactaatgagcactaggcttaatacctgggtgacaaaatactctgtacaacaaacacccatgacacaagtttacctatgtaacaaactgaacttaaaagttaaaaaaaaaaaagaggttcttattatgttgcccaggctgatctcaaacttctggactcaagtgaacttccaccttggcctcccaaagtgcctggccttagatattcatacatttatttatttttagagatgtggtgggggtgtggggggtctctctctgtcacctgggctggagtgcagtggccccatcatagctcactgaagccttgaactcctggactcaagcaatcctcccacctaagcctgccgagtagctgggactacaggagtgcactaccatgccgggcaaacacactgattttaagtacaactgtgtgctttcagtcttaagatcttcagcttttgaaggacctcagccttcctctagttctaactcctctcgttctaaggagatccttcccattcctgcagaacgtctccccaacccttcttcttcacagttctccctcctatccctgaaccattgcaagaggttttgtgccaagcctctggcacatggcacattctatctcatgttgtgatttcgttttctatgcacgtgctctccttctagcctggaggtgagctgcttaagggcaaagagctcatgtgtagcccttccttgtacccattgtcctatagcaggtgctacctagggggtgctccagtagcttccttgaatgaaccaaagagaaggggtgaaggggggagtcagttgcctaggagcttgcatggacttctgtgtcctggaaccagcccggagctgctggaagatgctagaagttggaatcctatctcatttctaaacatctgctcccactcatctctttccagggtcatcagttatccccactcctcccccccgcccccactttgtataaatgagcccctcacatccctccatcttctccatcactgtgtggtcacttcttaaatcatgcgtctggaaggcgccctcctgtaccccatcctggaggcttcctgcacttcccctcttgtttcttccagaaatgagtcagagtgaaagcaaactttctgaggtcctgagatcccggagacaggctgtgagggccgctggccccgcccgctccagcagcgtgtgtgtgtatgtctgtgtgtgtgtgtgtgcgcgcgcgcgcgcgcgtcaggggccaatgctggaaaggaaacagcggactcgctgaggagaagaaaggagccgcccccttcgtcgccagccccctccccacttcccgtccagcgcgctgctcccttccccccgcctctggcctcggggaaggagcaggaggcagcccaggcggagcgggaggagctggcagcggggcgcatgccaggcgggggtcctcagggcgccccagccgccgccggcggcggcggcgtgagccaccgcgcaggtaggggagctgccacagagtcctagcacgtcctgggggggtcctggcaaggagggcgcgctctggcccccaggaagtcgcgtaggtcagggcgtgcctctgttaacaacccctttcgaggtgagggaaactgaggcaggacgcgaggcgtgcgaggttgagagaagagcgagtcttgggctgccagcccggcaccagcgccgagccgggccaggtccctgacccaggactgtgcagcgatccccgggacccgcagtttgcgaaactgtaggagtctgacccgcgcccccgctgcgtgtccaggtgaccgggaaaggttgcagaggcgtgcttggggtttggatccgtccccgtcctgggacacctgcgccgcctgcactctcgttgcggtgcgccccagcctgcgccccctcgggacaggggacgtcccgcccgccttaaccccaagacccagctggatctcgggttccaccccttcggggacctggagggaggaggctgggagcgggaccaggaactggtgcctgtgccttccctaggggctgctctgaaatcagtgtcaccgcccacttcctacttggctacagtaacggggatggcccaagccggagactgctcggtttccaccgcctggagcgcgggtctcgctgtcaactcttagtgatgattgtggatggttgtttttcaacaatgacaggacttctaccttctcactcttaaaatgtgaggttttccaaagacagtgagatttggagttagggagtgctgccttgtgttcttgctgggtgaggacagggctgggtcagtcgcttaacctctcagagcctcagtctcctgaaatgtaaaggagaacactcatagcctggcctccatgtgtcgttaggtttgttgtatgggaaatcaatttgcaaagtgttatcatcaactggacaaatttgaattggacagcactaggaccataggaactggggtttggagacagtctgcctgcatgtcaatcctggacatgcaggagactatgacagtacctgcttcatagggttgttatgcggtttaactgtgatggtggaagtgaagcacctcgcccaatgcctgaaatacccagtgcactctcaaaaaaccttagttgctatttttcctaggcaaaatctaaataattgggagtaatgtgagaataccagtttgatttgattaatgcaggaatagtagggcatttaaaaacacatgtagttctcctgtgctcggcatggtacatgaagtcctctgaggttcagttctgtgccacagagcaaaaagaaccgtggacaagatacccgcttttcgggctctttgactttgagcctgttttctcatctgtttacaaaaaagataaaagaaaaatgggggtagtaattactgccttttgtactgatcgcattgcctgaggattaaatgaggcaaaagatctgaaagcaccttgtggagtatgagtcactatgcacatataagacatgatagtactaggagggaatggtaacatctgcaggtttttagaacttacaatgtgccagacattttattatgaattcctttgatgaaatcctccctgcatctttatgggactgggattacagtcctcatttccctatgacaaagctgaggttcagggtcaccctgcttggttcccaagctcacagagctcttaagtgtaaagccaggattagaaccctggtgtgggtgccactcacaactgtgttcttggccgcttgccaaactgaacttatagagtggagctgtgattcagaacagacctatattagaatttaggtaatttttttttctttaggagacagagtcttgctctgtcacccaggatggagtgcagtggcacaatcatggctcactgtagccttgaactcctgggctcaagagatcctcctgttccagctttttgagtagttgggattacaggcgcatgccaccatgcccagctaatttttttttttagagttggagtcttgctatgttgctcaggctggtctcgacctcctggcttcaatcattcctcccactttggcctcccaaagcgctaggattacaggcatgagccaccaggcccaacctccatcctgcatatctatagacccaaaatgtaagagtgaactgttaatcctggcaaaagaggctttggcataattttaatttccctcagacttattttataaaatatactttaaactatcttcttgtaaaacaaatgatgacaatttgcagaaaagttattaaaacattgaaagaacaggttgcaagatctcatcacaaatctctaagtggtatctggattgttttgttttgtttcaacactcatttgccagaacccttaggatagcacatgaggtgtaaccggaaatcgaggcgttgggtgtcatggttactttgcagggctgggccccgggacttttctgcaggaagttcattgctcacccaagatgcctccagaagaaagcagaaacttccgagaggagcgtgaatgctctgtttctgtgctgcagaaacaattcctagtttatttgtttcctaaattaagtttatcttattggtttttgtttttccaaaagcaatgcatgctcattacaggaagcacagaaagctacaaacaagtaagtgaacactaaaaaatactgtaatctcaccaaggtagacaaatagcttggtgtctctgtccttgtaacccatttctatgctgcatgcatccatccaaaagtgagaggcaaactattattgttttttgttaaatgacaaaaatagtacttgctaattgctcaaacattatgacattaatgtagaacaaagccaatttattatgctcattaaaactttttctttttttaaaatctaaaaattttgattggagaaggattagagactaaattgttgatatttgaattttattgtggttttggttaaagtttgatgcaggaccttcagagcaaagagagggtacaatggtgacctttaaacaatatatatattttttgagacggagtctcgttctgtcgccaggctggagtgcagtggcacgatctcggctcactgcaacctctgcctcctgggttcaagcgattctcctgcctcagcctctcgagtagtgggattacaggcgcccaccaccacatccagctaatttttgtatttttaatacagacagggtttcaccatgttgatcagcatggtctcgatctcctgaccttgtaatctgcccgcctcagcctcccaaagtgctgggattacaggcatgagccactgcgccgggccctttaaacaagatttaaagaccagcacacaaagtttctgagtacaaaaaaaggtaatattttaggttagggtcattagaccagaattagaatcattctttttttttctttttttaattaaaaaagatggggtctccttattttggccagattgaccttgagcctcaagcaacttctgcctcgacctcccaaagtaccaggattacagatgtgaaccattgcacctggccagaatcattcttttgataataatgatggtaattgagtttatatgctgtgttctcatgaatccaagcagagcccactgtttccagagattcccttggcagccaccctgggttgaggagggtcccctcctggcacagctggaaccaccggtgaagagccatttttcagtcagcaccgtttagtaatataagacttttagcctcgaggagtcttccgttgttagttcctaactttaatgactttgtggtaaaaattccttagcgaatgacttctgtgcaacaatcatgtaatttttaaaattccagatgctttagccgttcagaatccattttttctttcaaaaccagagttcaccagctgtttctcttgagcgaagactttgcaatgagctttcaaatgttcacaccaagtagaagcaggaagggagaactgtggctgggcaatgaatgaaatactgacatttagctgtagaaggtaggcaggggctcacatggtgtgcacagccccttatatgactactggtcctgtatctgcttcctttccctgccccatttcccctttggctttttgtcatgactcagaaatggatgctagacattatggggctccctccagtcactcgggtcactcgtcacagacttataaacagaatcacagaacttattgtcagatgaagcttcaaaacaccagttggctaaactccttgtgttctggcaggtaagatgtcggcatccttatttaacaaatgatgctactgagaactatgtatgcagagacatagtctcaaaataagtgcagtcatgcctcgcataatgacgttttgtcaatgtcacatatgtgagagtggtcccataagattatactgggctgtcaatttcctaatgcctagtatttactatacattttaatgttattttgtgtacttctacttagtaaaaaaaagttaactgtaaacccgcctcaggcaggtccttcaggaggtatcagaagaaggcattgttgtcataggagatgatggctccatgcgtgtttttgccttgaaggccttccaacgggacaaggtgtggaggtggaaggcagggatagtgatgatcctgaccctgggtaggcccaggctagtgtgtgtgtttgtgtcttagtttttaacaaaaagtttgaaaagtaaaaaaataaaaattaaaaataggagcttataggataataaggatataaagaaaaaatatttttgtacagctgcacaatgtatttgtgttttaagctgtgtttttataaaaaagtcaaaaaattaaaaaaatttaaaaattattatatataaagtaaaaaaagttatggtacgctaaagataatttattgttgagaaaaaaatttaaatgaatttagtatagcctaagtgtacagcgtttataaatacagtagcatgaaattatgtcctcaaccctcacgtgcactcaccactcactcactgactcacccagagcaacttccagtcctgcaagctccatgcatgataagcctcctatagaggtgtaccatttttcatcttttatagtgtatttttactgtaccttgtctatgtttagatatgtttagatggaaaagtacttaccattgtgttacggctgcctacagtattcagtacagtaacatgctgcacaggtttgtagcctaggaacagtagctatacaatatagcttaggtgtgtcatagcctataccatctaggtttttgtgagtacactctatggtgtttgcatgacaaaatgacctaatgacacatttctcagaaagtgtccctgtcaataagtgatgcatgactgtgattgaaataagtagccccacattatttttctcatgtcaacttcaggttaattttccagccacgtggccttgtgcttgctcatcataaaaaaatgtggataaaattctacctgttaagccacaacatttgcctgtcatgggtggacatttaccgtttattttcagagttcaaagtttgaactctcagagaaatgcaaataagacagtaaactcctcgaggtgaggaatggcaatctctgaagataaatcatatatttattgtacagtattgaatgttgtaagtggcagtagagatcatgtaatctggccttcttcttttacaggtgagaaaagtgagaaacagcagcagagtgattgttagaacctggctcctcttcttttacttagaactgttttcattaagttgtgtttcatttcatagttctgtataattcatccctgcttaagatacattaaatgaattgaactgaatcccttttttttgagctatgatggctcttaaaaacttagattttcagccaggcgcagtggctcatgcctgtaattccagcagtttgggaggccaaggtgggcagatgacctgaggtcaggagttcgagaccatcctggccaacatggcagaaacccatctctacttaaaatacaaaaatcagctgagcatggtggcgtgtgcctgtaatcccagctacttgggaggctgaggctggagaatcgcttgaacctgggaggcagaggttgcagtgagccaagatcatgtcactgcactccagcctgggctacagagagagactccgtcaaaaaaacaaacaaacaaaaaaccacgtagattttcaagtaattactattgttacactaaatgtcaatggatccttaagaatctatttgttcatgaattcattatttattcattcaacgtttattgagtggctacttggttcagaattagaattagcatgacagccacacattagaaaggtatcactttttgactaaattaaaaacttgctaaaaatagttatccattgatggaataggctaccccgaaaggcagagagcattttgtcattggaagtatgtagggcagtgtggatgactctagggtgactgtcatgagggttctgcactggggagggggctgcgttggatgatgaatgggaacccttccagtgctaagatgctgtgatcgttgtcctgcaggattgggattgtgcaggatttgagctactgtgtaaatttcctattccctgctcattgggcttccacattttgcttccttcccttgcccaggtggttccatttcaggaagcctagatagcttctttgcagtcatctgcccgaatgtcgtagctactttaactccccagagctgtacatgtctaggattgatattgatcattaacacaattatgttcgcccagatgaacaaatctaccaggagtagaaacgtgcatttgacaggtggccttgcatggagactaatcgctttcacaggttgaaaggtgaaatatctaaagtttaatgagtaagttgtgtcctgaatgtggaatctgagttgaaattgcattttgtgacatgtacgcctacctaacttttctttttcatacctgtcatctttttttttttttttttgaaacggagtcttgctctgtagcccaggctggagtgcagtggcgcagtcttggctcactgcaacctccgcctcccaggttcaagcaattcttctgcctcagcctcccaagtacctgggattacaggcatgccccaccacgtgcagctaatttttgtatttttagtagagacagagtttcaccatgtcggccaggctggtcttgagctcctaaactcaagtgatccgcctgcctcggcttctcaaagtgctgggattacaggagtgagccaccgcgcctggcctgtacctgtcatctcttggtttgtgagtggattgattattggactttatttttaacacaggagaatgtgcgtgttttgcatttgtagtgaaagcatgcctcatcttactccaacactgataggaaaaggaagattattttacaatggtcaagtgaaaaaaaaagtaaatacagagataaaacggggttctaatatttctgctacactggaaacttagagttgcaagagctgttttgggatcacaaatcttctgaagaaaaaaagtttgcgtatttcagtacaagtcttaatgtttccctagcgtcttgtgttatagctgcaggccaagcaaaatgaaatgtgagacactgtccttggggatagagcatctgtattcaatttaaacagtagatttgggggccttaaattgcctcgactctattaatcattttgtgttccttagtttatagaattatctcctagagacattaacttatccattaatttcttccattgtgtttatttattcattcacaaacactagcacctactgtatacacagtacagtgttgtacattgcagggtacttaaaaatgtagagtgccaggcatggtggtgcatgcctatagtcccagctccttggaaggctggggcgggaggattgcttgaggccaggagttcaaggtggcagtgcgctatgcttgtgcctacaaatagccactgcactccagcctggacaacatagcaagaccctgtctcaaaaaaaaaatgaaaaaactcccccaaaaccaaaaatgtagattgttctcaagggccatccagtctagagagaactaagggagcctggtattcttaggccttagagcttaacagccacacctaggatgcctcttcagaaggtgttccagcccttcctgtgtcttcccagttctgatactggattatgtcattatgtctctgttgagtaactccttccaatcaggcctgcacactgctgccaggacagtcctcacaaagcacagatctgattgggttattgttcctctgtggaaggggctttcagagactcattatctccccccaagcaaattcttagcatctcttttcaagctttccatacactggcccttaaacacttaaaacggacactctggcctttttattatgcacattattctgcccaccgagaatattacagaatccgtctttcttgctcccaatctgaacgcatcaaaatgtcatccctcatttaccacctagcaaatcaataatgcttctcagccttccctggttctctggaatcgtctgctctctccttcttctgttatagtttgttatggatataacctgtttttctgactccaatgtagacttcttcaactcaaggtttcagttctggtttatctccttactccctcatctatgtagtacacttatggtttactctgttctcactggattagaccaaactcttaattatatttaggatgtattaatccaatgcatagattaaccaagtctattatttttatatcttttgaaaccaatcaggagtttcagaagttcagttcagtttaaatatttattgagatgcatacactatatagtcagatactatgatagctcttgaatataaaaaatatatatacttatgtttgtatatatatgtgtaaattgatatgtaaattcaaatagatagtgttgtctacaccattgagaagcctatagtcccgtggaaaaaagagaattcattctcatgaagtttccggatattgtttcatcagaaggactgggcacatcggggtgtactaaaatcattaagaagtatttagcaccagtagatgcctaataaataccttacagtctagatggatggatagatggaggaagaaagaagggctcctttaatttataatttacctattgctgggtttactcctaggtatgacaattttgaaaacaatttactcaatgtttatttccacactgtgtatgaaatatgctgctcttcattcagaaagagatatataattctccatttgtagaacactgagttaatttcatggttgtgatgttgcttttgcttactttcacccacattttctcctctgtagggtggcagctccgtagggtggacacacgctttgggagacctgcagctgtttgtgtctgggggcaatggtgaagggcagtgactcattggcccagaactcatgatctcatctctcacccagctggctaatcggccttggggacaggaggatgagcgctgcactccctcctaatcatgcagcttttgtatgtctttctttacttgacttaaattgtaatttgaatggaaaaatggacaaattctatcatttgaatttaacttttatatattttcttgactctgatttgggattatctaagtgcatttattcaaatatttattgtgtttttgaaactttttttgaaaagcataaggtaatacatgataaaagatattgttattacccctgtttctgccatttcaaggagtcagaacaggctcagtggaaacaaaatgagatgtcttatgggagttactttcccttcagctaatcttggtatgaatttatattgacactacctttaaaattttattctgctttttaaattttactttaagttctgggatacatgtgcagaacatgcaggtttgttacataggtatacatgtgccatggtggtttgctgcacctatcaacttgtcatctaggttttaagccccacatgcattaggtatttgtcctgatgctctccctccccttgacccctaccccccagcaggccctggtatgtgatgttcccctccctgtgtccatgtgttctcattgttcaattcccacttatgagtgagaacatggggtgtttggttttctgttcctgtgttagtttgctgagaatgatggtttccagcttcatccatgtccctgcaaaggacatgaactcatccttttttatggttgcatagtattccttggtgtatatgtgccacattttctttacccggtctatcattgatgggcatttgggttggttctaagtctttgctattgtacatagtgctgcagtaaacatacgtgtgcatgtatctttatagtagaatgatttacaagcctttgggtatacacccagtaatgggattgctcggtcaaatgattagttttttatttatataaatttatggggtacagtgcaatttcattacatgcatagtttgcctaatggtcaagtcggggcttttaggatgtccatcacccaaataatgtacattgtacccattgagtaatttctcatccttcactcctcctatcctcacccttctgagtctccattgtctgttattccactttctacatccacgtgtggacatgatttagctcccacttgtaggtgagaccatgtgatatttgtgtttctgtgtctgacttgtttcatttaagataacggtttccagttccatcgatgttgttggaaaaggcatgagttcattttgtatggctgaatagttttcccttttgtatgtataccgtattttctttatccagttctctgttgatgaacatctaggttgattccatatctttgctgttgtgaatattgctgtgataaacatgtgagtccaggtatttttctgatacattgatttattttcctttgggtagatacacaatagtaggattgctatattaaatggtagttttatttttagttctttgagaaatctccatacttttttccatagagattttaataatttacattctcaccaatagtgtttaaaatttcccttttcacttttcactgcattctcttcaatatctgttattttttgactttttaataatggccattctgactggcataagatgacatctcattgtggtttcaatttgcatttctttgattagtagtaatgttgaacatgttttccatttgtatgtcttcttttgaaaaatgtctattcatgtccttttcacactttttaatggaattattttgttgttgttgttgaattgtttgggttccttgcatattctggatattgttggatgcatagtttgcaaatattttctcacattctgcaggttgtctcttaagtctgttgattatttcctttgctctgcagaagctttttagtttaactaagtaccatttccctatgcttttttgttgttgttgttgttgcctgtgcttttgaggtcttagtcatgaattctttgcatagaccaatgttcagaagagttttccctcagttttcttctagtatgtttatagttttgggtcttatttataagactttaattcatctttagttgaatttagttttgtatatgatgaggtataggggtccagtttcattcttctgcatatggccatccaatttccccagtatcatttattgaaaggggtgtcctttgcccagtgtatgttcttgtcaatgttgtcaaagatcagttggttgtaaatatgtggctttatttctgggttttttattctgtttcattgatctatgtgtctatttttataccagcctatttgttacctattgctgtgtttactcgttattctcttttttaatgagtaaaataccctttttaaaagacaacatccaaattaggagactgcctttgattaaaatgaataactattaatcatcacagagcagggaaagtgtgaatcatcaggaatttagtggagagaaatccactgttttgggtatgtctttgtattagtctggggtaaatttcttgaggacaaaccttgtctcatttgccttcttataattcatgttagacttatagtaacagtaaagacttactgaattgggttgctttaaaacagcatgtgtaatatagccaccatggcatgcaggagtaggtagaattgcccccaaccaggagtggctcttgaaacatcacagggagaggattaggtaacggttgggttagaaagaggagcacaaggcacttgtcttcatgttgcttgggctcacaagcacacttttcatgtagattgcgtgttcaagatcaacatgccaaaagtggcaaaaatctctaaaggagcctccatctacacatttcgtgagagaaaaatgtccattctccatatcaaagcacattatcatgattttaatttggagtggatttaggggactgatgaagcatggggcactgcagcatccccctagccaacccttacacctgtggtgctcccaacacctcctgcgttcatcatttatcatgaagtatggtgcattcctgaaacactggacaagtgcatcttctcctagaagcacggaggtacattccaaaggcaaactcacttaaattgtgatcagaatacttcaacttgcttgctattgttgtggataagtgatagttaaccacaaccggctgagtggccaggtggaaaggacatggatggggaaggaggttcagggtcctgcataagtcctctagtgtctgtagatctcagtgtcctcccttgtgaaaatggggataatatcagccctcaatttacacagttgtagtgaaggtccaatgtgatcagtgtttgtcacaacctgtcatcatttatgtgtatagaactgcttttactataaacttgcttgtattgtccccagcagccagtcctgcctataatctgttggcttcattgcttgtccagtgatctgtggctccctcctgtcctaatccaggtccaagtggattaatgttatctgattcacgttagtgtttctacagatatgtaatgttatctgaatcacattagtgtttctacagcaaaacagatgcttgttcccactaagtaggataaatgaagactctaaattgcttcacatctgtgcacatgaggttctgccaccatgtgagttcagtcaggtcagattactgccagatgaattagagaaggcttgaggttctcagagaattttggattttggaattagagatgatgcatcatggatttgtgcttaatagctgttttgctactttccctccccttcccctctctccctcctcctccacttccagttcttagcctcagttactattgtactgcctccgtttcttgagacaggctgctgatatgctgcctttggtctctgagccaccaggtatagcgctgcataatggaagaacagatgaacataagagtgtcttggggaagatgagcacaagacatcatggggttgtattgttacccccagcttcagcacattcccggagtgtaagtgcaggctggcttctccataaagcaacacagcagtatgctctgagtgggagtacctccgaaactcagcttccaaaactgtgggctcaccagacctccttggtattttttttttttttttttgagacaaggtctccctctgttgcccatgctggagtgcagtggcatgatcacagctcactgcagcctctacttgctgggctcaaatgatcctcccatctctgctctgcaagtagctgggactataggagtgtgtcacaatgcctggctatttttatttttatttattttttgtagagacaggatctccctatgttacccgggctggtctcaaactgctgggctcaagaaaacctcctgcctctgtctcccaaagggctgggattataggcatgagccaccacgctgtgcccctccctggtttttgatccttggtctgacccctggattctcctggttgacttacactctttggagtgctgactagtatagactctcccaatgctgccttttggatgaatcctgtgatgccacattttccagccttaggacaaatgataacctaccctgtagtctgtccatgctctggagaccctgctggtcttacaagatgaactggacaactgctttcactgataggcctgaaggaaaagggttggaactgtcaaggttccccattaaataccaaccagcaatgacaatcaaggtgagctattcttgtgctgggtaggatgctatcttgggctctgagtgtgtccggaattggtgggttcttggtctcactgacttcaaaaatgaagccgcggaccctcgcggtgagtgttacagttcttaaaggcggcgtgtctggagtttgttccttctgatgttcggatgtgttcggagtttcttctttctagtgggttcgtggtctcgctggctcaagagtgaagctgcggaccttcgcggtgagtgttacagctcttaaggcggcgcgtctggagtcgttcgttcctccttgtaggttcgtggtctcgttggcttcaggagtgaagctgcagaccttcgtggtgactgttacagctcataaaggcagtgtggacccaaagagtgagcagcagcaaggtttgttgcaaacagcgaaagaacaaagcttccacaatgtgcaaagggaccggagagggttgccgctgctggcgcctgcagcctgcttttattctcttatctggccccacccacatcctgctgattggtacagcccagtcgtctgttttgacagggcgctgattggtacgtttacaatccctgagctagacacaaatgttcgccacctccccaccagattagctagatacagagtgtccattggtgcattcacaaaccctgagttagacacagggtgctgactggtgtttttacaatccctgagctagacataaaggttctccaaggccccaccagactcaggagcccagctggcttcacccagtggatcccgcaccggggctacaggtggagctgcctgccagtcccctgccgtgtgcctgcactcctcaggccttgggtggtcgatgggactgggcgctgtggagcagggggcggcgcttgtcggggaggctcgggctgcacaggagcccacgaagggcggggaggctcaggcatggcgggctgcaggtccccagccctgccccgcgggaaggcagccaaggccttgcgagaaattgaacacagcagctgctggcccaggtgctaagcccttcactgcccggggccggcggggccggccggccactccgagtgcggacccgcggagcccatgctcacccggaactcgcgctggcccgcaagcaccgcgcgcagcccccggttcccgcccgcgcctctccctccacacctgcctgcaagctgagggagccggctccggccttggccaacccagaaaggggctcccacagtgcagcggcgggcggaagggctcctcaagtgccgccaaagtgggagcccaggcagaggaggtgccgagagcgagcgcgggctgcgaggactgccagcacgctgtcacctctcgtgagtatctctagtgctgctggcgatgagatgattcagtgtggatgattgataccaaatgtatcatggacagtgaaggctgtgtaacaacacatataggtaggctctgttacaggagttacagttctaggcccagtaaatcttttttttttcactgtgcaattgaattttggttttacctatataacattttcatctgtatgaaatgtaagctctatacaattctccattaggacattgtgtggattttggtgtttctgaatctcttctggctcagaaaattccctgctcttgctggtataatttcatacccaaagagggcattctaaccttgaaagaagttcagctcagcagagcgtctgtcattgcctttctctgtaaacacagttttccttcttccttggcttctcaggtgttttagctccagggaggaaatagtcacagtgaaaatctatttaataaaaccgttatgaaaatgtactcaacctgagcatgcactggaacagcagaagatgaggacttggtctactgccttcccaccaaaccttgccggctctgtaaattttcagagctgtcacttgtgagctatttccaccaagggagagcttctgtaaagttggggacttggcaggccatttcgctaattctttgggtgttcttttagcattgtctgcagtgagtgtgggagtcaaaggcccttcagtgcagagataatgccatcttgttccctggaaccccgaaagagccagagtcaaaggagctttttgtttcactcatagaaaaacccacaggaaatcccagcttcagatattcctattcagtttccttgtcccttcagatctcactgtgtttaggcctcctttgagtgaggcaataactagtaaaaaaaaataaaataaaataaatgaaagaatgccattcatggtggcttggggactgggcacacacactgtatacacggtgtgggggccttccccgggacgctgatgtccttgttctcctagcagtcaaaaattggccagtgaaatacagagaatactagctacctcatactgttaagagaattgactgcggtcagatgtgtagagtttcaagtacatacagtttctgcctcactgtaggcgctcaatattattattgaggagctattattagatttcacatctctgccagctcttgtgtcacttattaagcatatgactgggaataagctatttaattctcttcgtctgtaagataggaagtaataatgcttattttgtgggcctattgtgaggatcatgtaagatgagagataaaagggcttagcaaacggtagcatattacaggtggcctgcagcctgccgctgtgcaggtgacgtcccacacaatggtactggccgaggggtgaatggagccctggtgctgaggatggcgagcctttttctaattcatcagctcagaggtgccacctttttctaatttaccctccctaagaggacatctttttatattttaccagcccacagaagataccttttaaaaatttgcacaatggtaccatatgtgctagctgcaattctgtcaacaagagaaagatgttatttttagtgtagcagacagagaattctggagagggcacatggcatgctttatctggctccaacttggtcatttctgtttaatttcaatgatctgattgccatagagtcagaggagcaattttgctattgcccaaattctacattttcactaggattttccttgaaggcaaggactataacccccaccctgcccatcaccttgcttgctcaccactgccctgtacatatccttcagaatggacatttgttaacaatgggtaagagtgtaggctggcctttcacttaccttcctgtgctttgctctttactgctagggctagcagccggaaagctacatatcccaggctttctcgccagctcatttgctgttaaattctgttaataggaggcactggtgggagaccagtaagacggagagaaaaacttcctgattctgggttttactgtgaggccattgcaagcagttgctgtagtgatagtaaggaaggggtgagttggaacatcagcaaccctgcaggtaacccccttattggggctccaatcttagttgatgtagcacttccttggtggcttcagagccaaatggcacaacctcctcaacagtacagcagattgagaaggctgagggacatcgtttaggagcattaatgatgggtgtctagctatgacccccttttccttttcacttctgtcctctccttctcctttgttctcttctagttctttctatatctttgtaacaaattccctatattaaatttcttctgcttgagatacttgaagtggtcttagtttccctgcatttagcacgtggactctctgaatctgttgggtgcttagggcctgggtttgtgccctaggatcctgtgactgaattcttcctttctctttccatcctcatcatgcatgcaggattgtcgcagtagcctttaaatagattttcagccaccagcctctttctgttcactgtggacattattggtagtttaatttttctaaaaatctattttctggatccacatttctgctcaaaactctatttttatgataactatttaagcataggtatagtcatctatgacctaaaccccaaaggcaggatcgtcaccatggccaccttttctgtgatcctaataacagagagatctgtgtcagaagaggattggttgttctttcaccctggctaactggaaggcagggagctcagtggtagacacaccggtcatcatgctggtgtgggaaagatttcaaagcctggccatagctcccactgaagctcctttctgcaccttactgcttccttgtacaagtcaaaccagggcctttagagcagggaccttcattgcactgccctctcctcgcctcccaaatgataatatccagctttcaaggtctgcctgatgtcccagggttaggagggcagagaccaggcagtttatgtcatgtcacttcttttttttttttgtcttttaaaaaatttattatactttaaggtctggggtacatgtgcacaacatgcaggtttgttacataggtatacatgtgctatgttggtttgctgcacccactaacttgtcatttacattaggtatttctcctaatgctatccctccccgcaccccacgacaggccccagtgtgcgatgttccctgtcctgtgtccaagtgttctcattgctcaattcccacctatgagtgagaacatgcactgttcggttttctgtccttgcgatagtttgctgagaatgatggtttccagcttcatccatgtccttgcaaaggacatgaactcatccttttttatggctgcgtagtattccatggtgtatatgtgccacattttcttttctttttttttttttagagataacaatactcactttcaacaatttctagaactacagagaagaaaaacaaggaaatagaagatttgagcaacacaattaactagacctaacacacatctacagaacagtctatccaacaatagcagaatatgtacttttctttttttttttttacaataacagtgttatcatttattattttgattaactcgtcatttagcattaggtatatctcctaatgctatccctccccactccccccatgccacaacagtccctggtgtgtgatgctccccttcctgtgtccatgtgttctcattgttcaattcccacctatgagtgagaacatgcggtgtttgattttttgtccttgcgatagtttgctgagaatgatggtttccagcttcatccatgtccctacaaaggacatgaactcatccttttttatggctgcatagtattccatggtgtatatgtgccacattttcttaatccagtctatcattgacggacatttgggttggttccaagtttttgctattgtgaatagtgctgcatataaacataagcgtgcatgtgtctttctagtagcatgatttataatcctttgggtatataaatagcaattttgctattgccccaattctaaatttttggggcaatttagatcgctgggtcaaatgggatcactgggccaaatggtatttctagttctagatccttgatgaatcgccgcactgtcttccacaatggttgaactagtttacactcccaccaacagtgtaaaagcattcctgtttctccatatcctctccagcatctgttgtttcctgactttttaatgatcaccattctaactgatgtgatatggtatctcattgtggttttgatttgcatttctctgatgaccagtgatgatgagcattttttcatgtgtctgttggctgcataaatgtcttcttttgagaagtttctgttcatatcctttgcccactttttgatgggcttgtttatttgttttttcttgtacatttgtttaagttctttgtagattctggatattagccctttgtcagatgggtagattgcaaaaattttctcccattctataggttgcctgttcactctgatggtagtttctgttgctgtgcagaagctctttagtttaattagatcccatttgtctattttggcttgtgttgccattgcttttggtgtttcagttattaagtccttgcccatgcctatgtcctgaaaggtattgcctaggttttcttctagggtttttatggttttaggtctaacatttaagtctttaattcatcttgaattaatttttgtataaggtgtaaggaggggatccagtttcagctttctacatatggctagccagttttctcagcaccatttattaaatagggaatcctttccccatttcttgtttttgtcagctttgtcaaagatcagatggttgtagatgtgtggtgttatttctgagggctctgttctgttccattggtctatctctctgttttggtaccagcaccatgctgttttggttactgtagccttgtagtatagtttgaagtagtgtgttgcctccagctttgttcttcttgcttaggattgttttggcaatgcaggctcttttttggttccatatgaactttaaagtagttttttccaattctgtgaagaaagtcattggtagcttgatggggatggcattgaatctataaattaccttgggcagtatggccattttcacgatattgattcttcctatccatgagcatggaatgttcttccatttgtttgtgtcctcttttatttcgttgagcagtagtttgtagttctccttgaagaggttctttacatcccttgtaagttggattcctcggtgttttattctctttgtagcaattgtgaatgggagtttgctcatgatttgggtctctgtttgtctgttattggtgtataggaatgcctgtgatttttgcacattgattttgtatcctgagacattactgaagttgcttatctgcttaaggagattttgggctgagatgatggggttttctaaatatacaatcatatcatctgccaacagggacaatttaacttcctcttttcctaatggaatactctttatttctttctcttgtctgatggccctggccagaacttccaacactatgttgaataggagtgctgagagagggcatccctgtcttatgccagttttcaaaggtaatgcttccagtttttgctcattcagtgtgatattggctatgggtttgtcataaatagctcttattattttgagatacattccatcaatacctagtttattgagtttttagcatgaagtgctgttgaattttgttgaaggccttttctgcatctgttgagataatcatgtgttttttttcattggttctgtttatgtgatggattacgtttattgacttgcatatgttgaaccagccttgcatcccagggatgaagctgacctgatcatggtggataagctttttgatgtgctgctggattcggtttgccggtattttattcaggatttttgcatcgacgttcatcagggatattggtctaaaattctcttttttgttgtgtctctgccaggctttggtatcaggatgatgctggcctcataaaatgagttagggaggattccctctttttctattgattggaatagtttcagaaggaatggtaccagctcctctttgtacttctggtagaattcggctgtgaacccatctggtcctggactttttttggttggtaggctattaattattgcctcaatttcagatcctgttattggtctattcagagattcaacttcttcctggtttagtcttgggagggtgtatgtgtccaggaatttatccatttctcctcgatttttctagtttatttgtgtagaggtatttatagcattctctgatagtagtttgtatttctgtgggatcagtggtgatatcccctttatcattttttattgcgtctgttttattcttctctcttttcttctttattagtcttgctagcggtctatcaattttgttgatcttttcaaaaaaccagctcttggattcattgattttttgaagggttttttgtctctatctccttcagttctgctctgatcttagttatttcttgccttctactagcttttgaatgtgtttgctcttgcttctctagttcttttaattgtgatgttaggatgtcaattttagatctttcctgctttctcttatggacatttagtgctgtaaatttccctctacacactgctttaaatgtgtcccagagattctggtatgttgtgtctttgttcgcattagtttcgaagaacacctttatttctgccttcattttgttatttacccagtagtcattcaggagcaggttgttcagtttccatgtagttgtgcggttttgagtgagtttcttaatcctgagttctagtttgattgcactgtggtctgagagacagtttgttatgatttctgttcttttacattttctgaggagtgctttacttccaattatgtggtcagttttggaataagtgcaatgtggtgctgagaagaatgtatattctgttgatttggggtggagagttctgtagatgtctattaggtctgcttggtgcagagctgagttgaagtcctggatatccttttaaccttctgtcttgttgatctgtctaatattgacagcggggtgttaaaagtctcccattattattgtgtgggagtctaagtctctttgcagatctctaaagacttgctttatgaatctgggtgctcctgtgttgggtgcatatatatttaggatagttagctcttcttgttgaattgatccctttgccattatgtaatggccttctttgtctcttttgatctttgctggtttaaagtctgttttatcagagaccaggattgcaacccctgcttttttcttttttgctttccatttgcttggtagatcttcctccatccctttattttgagcctatgtgtgtctctgcacgtgagattggtctcctgaatacagcacactgatgggtcttgactctttgtccaatttgccagtctgtgtcttttaattggggcatttagcctatttagatttaaggttaatattgttatgtgtgaatttgatcccatcattatgatgttagctggttattttacctgttagttgatgcagtttcttcctagcattgatggtctttacagtttggcatgtttttgcagtggctggtacccgttgttcctttccatgtttagtgcttccttcaggagctcttgtaaggcagacctagtggtaacaaaatctctgagcatttgcttgtctgtaaaggattctatttctccttcacttatgaagcttagtttggctggatatgaaattctgggctgaaaattcatttctttaagaatattgaatattggcccccactctcttctggcttgtagagtttctgctgagatatccactgttagtcatcagacttccctttgtgggtaacccgacctttctctctggctgcacttaacattttttccttcatttcaaccttggtgaatctgacaattatatgtcttggggttgctcttcttgaggagtatctttgtggtgttctctgtatttcctgaatttgaatgttggcctgccttgctaggttggggaagttctcctggatagtatcctgcagagtgttttccaacttggttccattctccccgtcactttcaggtacaccagtcaaacgtagatttggtcttttcacatagtctcatatttcttggaggctttatttgtttctttttactcttttttctctaaacttctcttctcgccttatttcattaatttgatcttcagtcgctgataccctttcttccacttggtcaaatcagctattgaagcttgtgcatgcgtcatgtagttcttgtgccatggttttcagcttcatcagttcatttatggtcttctctacactgtttattctagttagccatttgtctaattttttttcaagggttttagcttcctagcaatgggttcaaatgtcctcctttagctcggagaagtttgttattactgaccttctgaagtctacttgtgtcagctcgtcaaagtcattctctgtccagctttgttctgttgctggcgaggagctgtgatcctttggaggagaagaggtgctctggtttttaggattttcagcttttctgctctggtttctccccatctttgtggttttatctacctttggtctttgaagatggtgacctacagatggggttttggtgtggatgtcctttttgttgatgttgatgctattcctttctgtttgttagttttccttctaacaatcaggtctctcagctgcaggtctgttggagtttgctggaggtccactccagaccctgtttgcctgggtatcaccagtggaggctgcagaacagcaaatattgcagaacagtaaatattgctgcctgatccttcctctggaggcgttgtcccagagaggtgcccgcctgtatgaggtgtcagtcggcccctacttggaggtgtctctcagttaggctacacaggggtcagggagccacttgaggaggcagtctgtctgttctcatagctcaaacaccatgctgggagaaccactgctctcttcagagctgtcagatagggacgtttaagtctgcagaagtttctgctgccttttgttcagctatgccctgcccctagagctggggtctacagaggcagcaggccttggagagctgcggtgggctccgcccagttcaagcttctccagccgctttgtttacctactcaagcctcagcaatggcagatgcccctccctctgccaggctgttgcctcgcaggtcgatctcagactgctgagctagcagtgagcaaggctccatgggtgtgggacctgctgagccaggcacaggatgtaatctcttggtgtgctgtttgctaagaccattggaaaaacgcagtatttgggtgagagtgtcctaattttccaggtacagtctgtcacagcttgccttggctaggaaagggaaatcccctgaccccttgtgcttcctgggtgagataatgccccgccctgcttcggctcaccctgtgtgggctgcacccactctccaaccagtcccaatgagataaacaggtacctcagttggaaatgcagaaatcaccatcttctgcatcgatcatgctgggagctgcagaccagagctgttcctatttggccatcttggaacagaatgcatcatgtcacttcttatacatgaatgagaataactgtgaaatgtgcacatgtgctctgagcctagataagattgttactatcatgttatattgttattattgtgttattatcgttattatcatgttattttcttacccataggttttccaacttgcttgaagtaatgctttcaggatactcaatattgaatattcaatactgatgggaaaactttcttaaaggaaatggacattacagggtcaactggaggaaaaataacacatttactgctcaaacatagcttgttgtttttatatttaaaaacataggcattgtaaaaagtcaaacaagcctgaaaaatgtatgggagaagatgaaatgatcactgaagtcacatattcctcactgttaatgatttagggaacatccttctagaaggttcacagagccatacaactttaccgaaatgggattatgttgcatcttgttttccaacctaattttttcccacttagtagtatagcacagatatgttttcatgtcaaccagtatgactttacactgttatttctttcttcttttttttctgagatggaggctcgctctgtcgcccaggctggagtgcagtggcacgattttggctcactgcaacctccacctacctggttcaagcgattgttctgtctcagcctcctgagtagctaggattacaggtgcctgccaccacacctggctaatttttgtatttttaatagagacggggtttcaccatgttggccaggctggtcttgaactcctgacatccggtgatctgcccgccttggcctcccaaagggagggattacaggtgtgagccactgtgcccggcctaatggttacacagtattccatgctgacaccataatttactcatccagttacattaaattggaatgttcatagttgttgacctttagaacatgccagtattaagtttttgtatttaaggtgatgctagttctaaagcatatattctgaaatctcagtggcttaacacctcagaagtttatttctccttatgtaaagtttaggttctctccatttgctgatggttaccttgaggtaccaggcttgcgtggaggggctgctgtgccttgcatggccatgcagggactcaggccctctccagcgtgtggtttgcaaggttgccctggcccttgctgcttagctggctgatagtggaagagaaagtgaagaagatgtcacaggaggttttaatggatcagaactggaagtggcagatactgcttctgcccccattccattggccagaatgtcacatggccatacaaaactgcaagggaggctgggaaatgccactcatctgtgtgtgtgggaggaaaggaaatacatttggtgaatactagctagtctctaacagagcttcccctactgtttaccaaattcctgttttgcttttcccctcacacacagaacacacccctcccagagtgagggaccctaagtcccatccagccctggcaccttgcttagtcactgttcaggatctctgggtgatgtgctgtcttccccatcacatctaaatgaggatccttgtggtttgatgacttatgaactagaagagaataaagttatttgcctcctccctagcgcctcccaattttcaatgaagcagggaagcattgtaacattagaagctcccatttagaacagagtaaagagcgggcagcacagtcatcacaggcccaaagcaacaatggaatccagttgggtgggcaaggtggaggttctcaaccagagggtgggagaactttcttgattagaccttgattttgccagaaaaggcaatctcttctcagttggtctccatggtccgagctctgtcctggcaagttccttcttgcactttattctcaatggctacgtttgaagtgattgcaggggagtccgccatcttaggagggtacacagctttgcagccctctagtgccctgctgttgtttcaaggctcaaatagacaaacgtctttaaaaaattttatttttagtccaggctcatggtttctttggccatacatttatgtcaaaaatttgataggattctgttttttttttaaattaattacttttatttttgacaaataatttacatatttatggggtacaatgtgaagctttcatatatttattcactatgaaatgattaaaccaagctaattaacatatccatcatttcacgtgtgtgtgtggtatgaaatttttgtgtgtgtgtggtatgaaattcttagcaattttgaaatatattgcattattattaactatagtcaccatgctgtggaataaatcttaagaacttattccttctgtctaactgaagctttgtatactttgactaacatcttcccatccacttctacccttgccccagcccctgctaaccaccattctattctctacttccgactttttttagattacacctgtaactgagatcatgcagtatttttctttctgtgcttggattacttgtttctgttctgttttcttcccttaagttttttatgccaatagcaaatccctaagtttttttcctagatattattaccaagcttgaattattatattactttctcaccctaatacccttttctgtcaatgagatggtgacttccttgaggccttcagggtcagatgggaaggcaaaattcttaattagctctttgctacaaggctgaatcttttacctgtgtcactcaaaagccttttcaatcttgtttcttactcctcagactttagaagcagtcatttcttccaaggctttacactcagaagtttctggacaaacatctggactctattccctttcattttatgcttgcaaaccaacaaattctttttttaaaaaagtattttaatagctttaggagtacaagtggtttttgcttacatggatgaatggtatagtcctgaagtctgaaattttagtgtacccaagttgcgtacattgtgcccaatatgtaacttttaaagtcgcccctcccacactcccctattctgagtctctaaagtccattatatcactttgtgtgcctttgtgtatccatagcttagctcccatttaccaatgagaaagtacagtgtttggttttccactcctgagttagttcacttagaataatggcattcagttccatctgagttgctgtaaaatacattatttcattcttttttatggctaactagtattccatggtgtatatataccacattttcttcatccactcattgattgatgggcacttaggttggttccatagctttgcaattgtgaattgtgctgtgataatcatatgcatgcaggtgtctttttgatgtaatgacttcttttcctttgggtacctagtccagtagtgggattgctggattgaatggtagatctacttttagttctttgagaaatctccatactgttttccatagaggttatactgatttatgttaccaccagaagtatataagcttttccttttcaccatatccatgccaacatctcttgttttttgactttttaataaagggccattctgtttgggataaggtggtttctcattgtggttttaatttgcattccctgatgattagtgatggtgagcagtttttcgtatgtttcttggccatttgtatatgttattttgagaaatgtatattcatgtcatttgcccactttttaaagggattttttccccttgctgatttgtttgagttctttgtagattctgggtattagtctgttgtcggatgcatagtttgcaaatattttctcccattctgtgagttgtgtgtttactctaatgattatttcttttgctgtgtggagcattttagtttaagtcttatttatttatctttgtgttggttgtttttggggtcttagttataaattctttgcctaggctactatccaaaataatttttcctaggttttgttctagaatttttatggtttcaagtcttagatttaagtctgtaatccatcttgagttgatttttgtgtatagtgagagatagagatccagtttcattcttctacatgttgctatttagttttcccagcaccatttattgaatagcatgtcctttcttcaatttatgtttgtatatgctttgttgacgatcagttggttgtaactatttggctttatttctgggttctctattctattctatttgtctatgtatctacttttataccaataccatgctattctgattacaatagccttgcagtataatttggagtcagttattgtgatgcatccagatttgttctttttgctcaggattactttggctgtctgtgctctttttttggttctatatgaattttaggattgttcgttctttctttttcttttcttcaacttttattttaagttcatgggtacatgtggaggatgtgcaggtttgttacacaagtaaacgtgtgccatggtggtttgctgcacagatcatcctatcaactaggtattaagcccagcatcaattagctattcttcctgatgctctccctcccacccactgcccactgatagttcccagtgtgtgctgttcccctctatgtgtccatgtattttcatcatttagttcccacttatagatgagagcatgcattctttggttttctgttcctgtgttagtttctggaggataatggcttccaactccgactccatccatatccctgcaaaggacatgatcttgttcctttttatggctgcatagtattccatagtgtatatgcaccacatttatttatccagtccatcattgatgggcatttagattgattttatatctttggtattgtgaaaaatgctgcaatgaacatacacatgcatgtatctttataacacaatgatttatattttttggggtgtataccccgtaatgggattgatgagtcaaatggtacgcctctaggtctttgaggaatcactacactgtcttccacaatggttgaactaatttacactcccaccaacaatgtaaaagcatttctttttctccacaacctcaccagcatctgttgttttttgacatcttagtaacagccattctgactggtgttagatcgtatcttattgtggtttttatttgcatttctctaatgatcagttatgttgagcgttttgtcatgtttgttggctggatgtatgtcttcttttgaaaagtgtctgatgatagtttcttttgctgtgcagaagctctttagtttaattagataccatttgtaggtttttgcttttgttgcagttgctttggtgttttcatcatgaaatctttgtccatgcctatgtcctgaatggtattgccttggttgtcttgcagcatttttatagttttgggttttacacttaagtctttaatccatcttgaattgatttttgcttaaggtgtaagggatgggtccagtttcaattttctgcatatggctagccagctctctcagcaccatttattaaatatggagtcctttccccattgcttgtttttgtctagtttgttgaagatcagatggttgtaggtgttgggtcttatttctgagttctgtattctgttccattggtctatgtgtctgttcctgtaccaataccctgctgttttggttactgtagccttgcagtatagtttgaagttgggtagccatgatgcctccagctttgttctttttgattatgattgtcttggccatttgggatttgttggttccacatgaattttaaaatagttttttctaattctgtgaagaatgtcaatggtagtttaatgggaatagcattgaatctataaattgctttgggcagtatggctattttcatgatattgattcttcctgttcatgagcatggaatgtttctccatttgtttgtgtcctgtacgatttctttgagcaatggtttgtagttctccttgaagaggtccttcacttcccttgttagctgtattcctagttattttattctttttgtagtaattgtgaatgggagttcatttatgatttggctctttgattgcctgttgttggtgtgtaggaatgctagcaatttttgcacattgattttgtatcctgagactgctgaagttgcttatcagcttaaaaagcttttgggctgagatgatggggttttctagatataggatcatgtcatctgcaaacaaagataatttgacttcctctcttcctatttgaacaccctttattttgttctcttatctgattgccctggccagaacttccaatactatgttgaataggagtggcgagagaggacatcttgttttgggctgtttttcaaggggaatgcttccagcttttgcccagtcagtatgatattggctgtgggtttgtcatatatggctcttattattttgaggtatgttccttcaatacctagtttattgagaatttttaacatgaagggatgccagattttatcgaaggccttttctgcatatattgagataatcatgtggtttttgtctttagttctgtttatgtgatgaatcacatttattgatttgcatatgttgaaccaactttgtatcctggagatgaagccaacttgattctagtggataagctttttgatgtgctgctgcattcagtttgtcagtattttattgaaggtttttgcattgatgttcattaaggatatcggcctgaggttttctttttttttgttgtatctctgccaggttttggtatcaggatgatgctggcctcatagaataaattggggatgagtccctccttttcaattttttggaataatttcagtcaaaatgatacccctttttctttgtacctctggtagaattcagctgtgaatctgtctgttcctgggctttttttggttggtaagctatttattactgtctcaatttcagaactcattattggtctattcagagattcaatttcttcctggttcagtcttgggagggtgtatgtgtctaggaatttatccatttcttctagattttttagtctatgtgcatagaggtgtttacagtattttctgatggttgtttgtatttctgtggggttagtggtgatatctcccttaacattttctattgtatctatttgattcttctctcttttcctctttgttagtctagcaagtgatctattttattatttttttcaaaaaaccagtttctggatttgttgatttttttgaagggttttttgtgtctctgtcttcttcacttattatgccctcatcctggttatttcttgtcttctagctttggagtttgtttgctcttggttctctagttctttagttgagatgttaggttgttaacttgagatctttctagcttttgatgtgggcatttaatgctctaaatttccctcttaacaccactttacctgtgtcccagagattctaggacattgtctctttgttctcattagtttcaaagtacttattgatttctgccttaatttcattatttacccaagagtcattcaggagcaggttgttcagtttccatgtagttgtgtggttttgagtgaatttcttaatcttgagttctaatttgatggtgctgtggtctgagagactgttatgatttcagctcttttgcatttgctgaggagtgttttatttccaattatgtgatcagttttagagtaagtgccatatgtcaatgaggagaatgtatattctgctgttttgtggtggagaattctgtagatatctatcagatccacttgatccagggctgagttcaggtccttactatctttattaattttctgtcttgatttgtctaatattgtcagtgggttgttaaagtctcccactattattgtgtgggagtctaagtagtctaagtgtgtcattcttgaagaacttgctttatgaatctgggtgctcctatattggatgcatatatatttaggatagttagctcttgttgaattgaactctttaccattattaatgcccttctttatattttttgatctttgttggcttaaagtcttgttttgtcagaaattaggattgcaacccctacttttttctgttttccatttgcttggtaaattttccttcatccttttattttgaacctgtgtatgtcttgcatgtgagatgggtctcttgaagacagcacaccagtgggtcttggctctgtccagcttgccattctgtgtcttttaattggggcatttagcccaaaaaaaaaatatatatattttatattttttgagatggaatttcactctgtgtcacccaggctggagtgcaatggtgcagtcccagctcacggcaacctctgcctcccgggtgaagcgattctcctgcctcagcctcccgagtagctgggattacaggcacctgccatcttttagtagagatggggtttcaccatgttggccaggctggtctcgaactcttgacctcaggtgatttgcctgcctcaggcttccaaagtgctgggattacaggtgtgagccactgtgcctggcctagcccatttatatttaaggttagtattattatatgtgaatttgatcctgtcatcatgatgctagctggttattttgcagacttgtttatgtagttgcttcatagtgtcactggtctgtgtagttcagtgtgtttttgtagtggctggtaacagtttttcgtttccatatttagtgcttcctggtggtgatgaattctctcagcctttgcttgtctgaaaaggatcttatttctccttcatttatgaaccttagtttggtcagatatgaaatcttgggttggaaattcttttctttaagactgtagaatattggcccacaatctcttctggcttgtagggtttccattgagaggtcctcagttagtctgattggcttcccgttgtaggtgacctggcctttctttctggctgcccttcactttttttttttcatttcgacctggagaatctgatgattatgtgtctgggggttgatcttctcatggaggatcctactggggttctctgcacttcctgaattgaatattggcctatcttgccaggttgggtgagttctcttgaatgatatcctgaagtgtgatttccaacttggttccattctccctgtccctttcaggtatcccaatcagttggaggtttggtctcttcatagaatcccatatttcttggaggttttgttcattccttttcattcttttttctctattcttgtctgcctgtcttatttcagaaagatagtctttaagctctgaaattctttcctccacttggtctattctgctattgatacttgtgattgcattgtgaggttctcgtgttgtgtgttttcagctccatgagcttggttatgttcctctctaaactggctattctggctatcagcttctgtattgttttatcatgattcttagcttctttgcattgggttacaacatgctccttttactcagtgaagtttgttattacccaccttctgaagtctacttctgtcagttcagtcatctcagcctcagcccagttctgttcccttgctggagaggtgttactgtcatttggaggagaagagccactctggctttttgagttttcagcactgattctttgcttatctttgtgggcttatctaccttcaatctttgaggttgctggcctttcaatagggttttgtgggattctttttgttgatctttttgttgttgttgttttctgtttgtttttcttttcatagtcaggccactctaccgtagggctgctgcagtttgctgggggtctgctccagaccttggttgccttggtttttcctgtacctggagatatcaccagtgaaggctgcaaaacagcaaagatggctgccagctccttcctgtggaagctctgtgccagggggatactgacctgttgctggccagaacatatctgtaagaggtggctggagacccctgtttggaggtctcacccagtcaggtggaatggtatcagggacccatttaaagatgagtcttgctgctttttgtctgaggaggtgtgctgcattgtggcagacccttcctcatctggactgtttgcattctccaaagccagcaggctggaatggttgagtccactgaaccacagagatggcagccacctctccccctgggagctgcatccgagggagaggtcagagttctgttaatagaacccttgttggcgtggctgaagcccccacagggaggtccctcccagtaaggaggaatgaatcggggtcccacttaacgaagcaatctggccacagtgtggcaaagcagctgtgctgcattgtggggggcccttcctcatctggaccatttgtattctccaaagctggcaggctggaaaggccaagtctactggaccaaagagatggtggctgcccctctccctggaaactcggacctatctcaggcagattccagcctgttgctgttgtatgcctaagttaagttggtataaattcaaaatagattgttataactataggatattatatgtaattcccatggtagccacaaagaaaatatctatagaatgtacacaaaaggaaatgagaaaggcatcaaaatgtgcctctgtaaaaaaaaggtcaacaaaacacaaagaaaactggtcatggagaaaatgagggtcaaaaatactgtaagatataaaggaggcaaaatggcaaaagtaagtccttccatattagtaatcgagactctgtcttaaacaaaacaaaacaaaacaaaagaaacaaacaagcaaacgaaaaacgtccagtcaaaagcatagattggcagaatgaattaaagaaaaacatgatctaactgcatgctatgagagacccactttagatctaaaggttgaaagtgaaagcatagaacaagatgtaaatagtaacaaaaagagagctttggtgtctacactaatatcataaaatagaatttaagtcaaaaatttttacaagaaaaaaggacattatatgttgataaaagggtcaatttacctagaagatacaacaattcaaaacatatatgcaccaaacatcagagctccacaatatacgaagcaaatgttgacagaaatgaagggagtaatagacaactctgcaatcaaatgcctgaataatgcagtatgtgggctagtccagcctctctcatgatttccacatcactttgatgtggacatcctggacatctgcagttttcagttacttcctgtttcctgctggcatttaagtcccttgtactttatgtgaattcttacttcagttatactgcccctacaacttgcaatgaacattctcactttggttgtatcactttccaccctcctgcctgaaatctgatgctttccttcaagctccatccccactaggaagccttttgtatgagctaagattaacaacttgcatcctttaccctccacgtgttgcatatacctataccactcatttagcacatcacatttgatacttatttatttgacacatgtagctatatttaatctatttgtttggtctcctccataaccagagctttatttccatgggggctaatgctcctttaagtttctggcaatgattactgttatatagatgcagaatcttatttttttaatgaattaacagatgtctccctaaattaggcccaaatactgatcttaatcctaaggattagctaatagaagcatcataggtattaagttggacagatatggccaaactgtttaattttgtgagcttcagtttcatgtgctaatgccatatctatctatctatccatctatctatccatccatccatccatccatccatccatccatccatccgtctatctatgtctagcttgaccatcacaacagtctaaggagaagctatgcttatccctgtttttcagatgaggaaactgagacccagagacattaagtaatttgccaaaattacccaactcacacatgaaagagtcaaggtttgaacctagatctccctgactccactgcttgttattttaaacatctacaatatttacctttcagttcttgaacttaatcttgcctgagatctaagttcaagcctttcattatccacatccccccatatctaatgatagttgtggtaggcagaataatatccccccaaagatgtctgcatcccaatcctggaacctatgaatattttaccttgcatgacaaaaagggactttgcagatgagattaagttaaggatctttagatggagagactatctttgctatccatgtgaacccaatgtaatcatagggtgctcataaaggaaagagggaggcaggagtcaaagtcagagagagatttgaagatgctcaactgcttttgaagatggagaaagggaccaaagccaaggaattcactgacaccttgattttagcccagtgagactcactttgacctccagaactgtaaaataatagatttgtgttgcttgaagccactaaatttatagtaatttgttatggcagcaataggagactaatacagttgaccctcgaacgacacaggtttgaactgtgagtccacttctacatgaattttttttttagtaaatatattagaaatatttttggagatttgtggcaacttgaaaaaactcgcagacaaaccatgtatcctagaaatataaaaaaaaaataagaaaaagctatgttatgaatgcataaaatatatgtagatactagtctattttatcatttactaccataaaatgatacacacatctattctaaaaagtaaaaatttatcaaaacgtatgcaaacagagtgtacatggcatcctttgcagtggagagaaatagaaacaacataaaaaatgcagtattaaatcataattgcatacaattaactgtatacataaggtactgtggtaataatcgctgcattgccacctacattgctattgtggtgagctcaagtgtgggaagtatccacttaaaatgccatgtgatgctaaccgtctgcacatgagcagtttctctctccagtaaattgcatattgcaatgaaagttatctctttcagttctcacatttttttttgtgtttggagcaatactataaactttgagtaacacagcgggactcatacgaagtgccactactgatgctggaagtgctcccaaaaagcagagaaaagtcatgacattacaagtaaaagctgaattgcttgatgtgtgctataaattgagatctgcactgtggttgcccaccatttcggacagatgattcagcttgtaagcagacaatgtaaacttacaatatcaataagtaaagtacagtagtgtaaatacattttctcttccttatgattttcttaatattttcttttccctagcttaccttaattgtaagaatataatacatatacagaatatgtgttaattgaccttttctgttatcaataaggcttctggtcaacaatagcctattagtaggtaagattttggagattcaaaagttacagtgaattttaactgtgcaggtgattgatgcctaattcccatgttgttcaagggtcaactgtacaataggttttctgctttccttaccctcctgatgatttctgaactagttctacagagtttcctcttttcctttgcatctctccttcccactgccaccatccagattgttttcagagcggcacttcatcagctgcatcgtcaccctctgagggtgtggaagggctctcacttccacttaaggccatgccatgctaattgcctttctggctcttttctcttaaaaggtggtgcttagaaaggaaaggaatagtccatatgtggtcttagtaggacagggaacagtaggtctttacctcccttaatccgaatgttagatctcttcaatgcaatcaaggtaatgcttatttttttttggcacccacatcacatccactgctcactcaggttgagtttattgataactacaaccccaagcttttcatgtcatattaaagcaaaagccattatgagctgttcttatatctcgtagaatgtctgccatcttgtgtcatgtagcttttgtctcaggaaaaaaaaaaaaaaaaaaaagcacagtacgaattaatctctccagggaaagatttaaagactaggataataaggagagacagatggaattctgagagaaatatggcaaattctagagctaatctaattaaagggccatgggaacttctccctggcgcataaataaaatatgacaatcagtgtcagctaagaaacccttagcaaatacctaatctcatttttaaatttatcattacatagaactgttatcttttaacaaataatggtatgatgcaaaataagctgagagaagccaacagacacaggccaggcagctgcccagcctctctgcccacccctccctacatacacttcaggtggcatgggctctcccagccatttcgatacatgacacctctgtgacctcgccagcttgaaggataaaatgaaaggttcttagtgaaggaaaaaggcgttcatcttcaccccatcgtaatgggctctgaggaggactggcaacatgtagaatctggagaggagaggtcaggactggctgcagaggaggaagctgctgaggtgattagtagttctcagagagggccttgttctttccctttaaattcaaaatggcagtgcctcaaaccctctgggcttcctggaatttgtgtttaaatgtttatgtatttccaggcgaatattcaaacaatgtagctaagatgtggtaccttcaaagcaagtaaaccagctggcttccctgctatgatccccttgcacagcctggcccttcagacaggagcctgtattctgaaggaagtccttacagagcagcttggatctactaccccttaaaagaaggaggaactggtgaaattatttccattaactttaaggtactcaagaggaccacagaggtcttattcttttcagtttggataaatctggggcagtccaaaggttgccaagggaggtaggaagaaaagtttaatttgcacacttgagctttacagtctgtctgacttcattggagtttacttctttttaaattgcagactcagggcttaaatacttccttaccttcagtgacctttcctgagccctcctgttcctgataagctgcagggcagtgctttctttcctatgatgtgttgtcatattaacacacacacccagagtgattactgtgttcacttcccctggatgtgcttcatctttgttgagttaaaatcaaattgctttctacttcagtaaatccaattcagccttcttactgaccatgggttaaagttttaatttaaaattccctttcttttaaaaattagcaattcaaattcaaggtggtaaagcagcccacattctgagattgttggtgttggaaagggccttagctatcgtctgtcctgcgtgatgcttctgttgaattatctcaaggacagaatagttactactttgaacagattaggtggaatgatgtaaatgaaagtgctttgtaacttgtaggacattaaaaaataaatattattagcatttataaagatgctttttccattgttgccaatgttacttattttttcaaaactactttattgaggtcttattgacataaaaaaagctgtacatacttagctgggcgtggtggggggtgcctgtaatgcaagctacttgggaggtcaaggctggagaattacttgaacctgggagatggaggttgcagtgagctgaggttgcactattgcactccagcctgggtgacagagcaagactctgtcaaaaaaaaaaaaaaagctgtgcatacttaatacatacatcttgataagtttcaggataagtacaacacacttgtgaaaaccacctgtgaatcccacttgtgaaaccaatcattaaacatgtccctcaactcccaaagtttcttctttattattactatgattaattttttttggtgaaagcatataacataaaatctaccctaggcaaattttaagtatacaatgcagtgtttgttagctataggcattatgctgtatagtacagcatactgtacttactagcttaagctttagatattataacatgtgttttcctgttgaactcctgtcttccttcttgtgggtataaactagaataactttatagatcgcttgggaacatttttcacctcaagcggccattcctgtccaggtgtgggatgtgcaacacagtggtccaagagatgattttcagagtcacaaggacatggcatggggtaccattgactcacgttctcctgctaaggtgaaagtctcaatttgctgctagtgcatctttaaccttctctaactctcatttccctttgttataaagacagagctcagcagacttctgtcccaaaatctttggccaacagcaaaccatatttgtatggttatcttctaattatggggagtgattttcatatcccagtgatagtgataccaaaaaagaataaaagtatcctttaaattgacaagcaccatgaagtggtttgagactggctggtgtttgggacatggctttccacggagcttgagagatgggccatggatcagattactgcccactgtgacagacaacacacaatttgccatttcctatggcagtctttgacatatctgaagtcagtgctcatgtgtcctttcagccttcccttctttaggtctcacccttccagtttcttcacatgttccttatttgatgttctcctgcaatggtgactggagtctatcagtttttcttttgaggaagctccctgttcatcatttttatagaaggagcccttgttctgatatcagagagcagttcctcaagttggttgagaaagggaagtcagggagcaaaggagagttaatagggatgacatggaagaattgcagtgatagggatgcctgggaattgttaggagaacacttaggtccttagatgtctttatgttggtgtacaaaataggggttatcaaaactataaaaaccctggaagataactgaggcaataccattcaggacatagacatgggccaagatttcatgatgaagatgccaaagcaattgcaacaaaagcaaaaattgacaaattggatctaattaaacttaagagcttttgcacagcagaaaaaactatcaacacagtaaacagacaacctacagaatgggagaaaatttttacaaactgcatccaacgaaggtctaatatccagcatctatagggaacttaaacaaatttacaagaaaaaaaacaaacaaccccattaaaaagtgggcaaaggacatgaacagacacttttcaaaagaagacatacatgcagacaacaatcatatgaaaaaagctccacatcactgatcatgagagaggtgtaaatcaaaaccacagtgagataccatctaacaccagtcagaatggatattattaaaaagtaaaagaataacagatactggcgaggttgtggagaaaaaaacgcttatatgctgtcggtgggagtgtaaattagttcagccattgtggaagacactgtggtgattcctcaaagacctaaagacaggaatatcatttgacccaacaattctattgtggggtatatacccaaaggaatataaatctttctattataaagacacatgcatgtgtatgttcactgcagcactagtcacaacagcaaagatatggaatcaatctaaatgccaatcaatgatagactggataaagaaaatgtggtacatatataccatggaatactatgcagccataaaaaagaatgcgatagggacctggatggagcgggaggccattatccttagcaaactaacacagaaacagaaaaccaaacaccgcatgttctcacttataagtgggagctaaatggtgagaacacatggacatatagaggggaacaatgcacactagggcctattgaagaattggagggttgaaggaggaagaagactaggaaaaataactaatgggtactaggcttaatacctgggtgatgaaatagtttgcacaacacacctccatgacacaagtttacctacatgcccctgaacttaaaagttaaaaaaacacaaaaataaaataggggttataagcaaaatgtgtgcaacaggtggtacatgtgtaaagactgtcaagattgggttgaaaagtctgtgagagtgcctttgcagcttgcttctctgagccttaaggtgttccacctctaaaattggttgaaatgaggtattgtatggaaaaggctttggtaaacgaggaagtgctatacaaatgtcaaatattagttttttcattagttatattgttattttatgtcactgttataacattgacattctgttcagtgtttatcctggtttctcttcagatcatataaatcttgtgacttttacgaaagattcccatgaagaggaacaactctgagacttaaaccaatttttcagccttggtgctttgtataaaggatccagcactccccagtagtcctttcataaaagagccctgccattcccaagtccattgtcatgatttattgcttgcttgttgggatttcaccatctagaggtttttaatcaagaaagcctatggttgttttagtatccaaatccatgcatgttaaataatgactttttattgtctttataatgtctgccaacctggctgggtataaaattcttgagtatgccctgctccccacctccatccaaactgtatagggagtgttacttggcgttgaatattgccttggaagccagctttaattttgccctttgtacatgacttgagttttttcagagaatcagtcaggattcattcttttttctttggatttcagtgattttaccaggacatcttggtgttggtcataatatttcaatttgttttttaggagctgtgtgatcttttatttgtaggtttagtttggtttcctatttattttttcttctcaagggacatcaattgtccatatttttgtttgccttgtgtatatatcatcttccttttcattattttttttttaccttttcctttgcattttgctattttctcaagttgatattccataccattgactctattttcagctgtaactgtgcctcttgctgcttctgagatggcttcatattatgaatgaactgagcagaacacccaggcaggcatcagttggcctatggtaaatcttcctaggttatcataaaaaaattaacattaccatagctcagattaatagttggccaatagctgccttcttctccccagctcaacacatgcttgaactctccattctcctgagtaaaggaccttggaaaaacactccttaagaactggagaaggttgtattggttttagtatctgccattaattttatccacattttacagtatttggcaggtattctcatggttttaagaagcaatatagtgttaagagcatagttatggagaaaactgcctgggttttaattaaaatttttccagttgctagccatgtgaggttgggcaagctacttaacctcttgattcctcagttttcctcatttgtgaaggaggttagtaatagcactgctatgagatgaaatgaattaatatttgtaaaatgcttataaccctgctgggtacaaagtaggtgtcttgaagtgatcataagatgcattgtcaataaactttcctccccaatttctcaatcactttgctcatttcagtgggtttcacagaggtgtcattaactgtctttattccattatattgtgccagaggttgcctgatttgttttgctcataacgggattgttttaattattcatttagaattgcatccagaatatataactggctggctagtctgtgcttcttagattctgttttttttctcttcttgaaacgagaatacttgtcaatctttgatcttcagtaagtccatgatttctcaaggtctattgagtatatttctgtcatcatgtctgtcagttcttttagtactagatcctgactgatttgacctcagttggggacatgaactcatttgaaatggctaggtactctctttctatctttttacctctcttgggcttcaattcctcctaaattatgctaccactatctttttcaatctgaagatcattttctttaatagagatgaaggctgagaatttgagctatgtcattctgccctgtcttctctcttatctattatcactgtgccctagatactgggcacttccctgcctggttgactttcttgtcctgctccatttgtttgtgtgtttgtttgaagcacacctttgtgctgtccttagtatatttacaggaagtggagctcattctggcctttggtcttcttgacatttttcttattgctttgtgacccccttgggcttactcctggttgcttcccttctgtggatctttgtacatgtcctttgaaaatttctgcctttcagacagcttccttttcaatctcagaagtacttgtagatactttacccaccttgtctgccttggcattattgtactaattaatgtcttggggcacttgggaaagatacctgttgttccttaactccctgacctgggggtttggtttgggagaggtgagaagaggcccagaaatctgcatttccacaaacctcccaggtgattttgatgcacgtgacccccagatcacactcatgcctaactagtttggtgcagaagctcctaacctcttttttctgatcaagctgtccatgaagctgagttgatgagtgacctctggtgagtgcagggggactccctggggcttaccccagggtcaggtgcaatggttcttggcttgaagccagctctaattctgtgccttcctttgccactcaagaaagacaactgaatatctgaacttgaatctgttttcattataaagaattaaataactcgcagttttagtgctttattacttcctccaacatatcttccactccattactggtgtgctgtcccctggaggtgggaaaatgactcactcagcatcctttccttggctatttctttcttttcttttctttttttaagaaactggggtctctctctgttgtccaggctggagtgcagtggctattcataggtttatcataatgcactatacccttgaactcctgggctcaaggaggctgggctactcctcagcctcttgagtagctgggactataggtaggcgccaccacatctggctttcttcttggctatttttaactctagtttgacctggtcactttctccagagatttctttccttccacataatctgtaaattctgaatggctgtcagattaagtctgatgccattcactagaaaagatctttcattaggaggctctacttgaaaccaaacggactacagcacattttcaacttggaaagatttgaagaactgggaagcatgaagatctttgtacctaattcaaggcagtgatgtttggacacttcgactgtgtcgtgtttctcttagagctcttagtaggctggttattctgaaaggttggagtgtctcatagataaacaacaaacatcattgagtaattatacttttggggctcacgtttgagtattgacaactgtgaaaagaggaggtatagactccttacgagtttagtcctatgctctaagacatgtgcatttatcccagactctcgtataaaaagccagtgcccattgtgtgcagaatagggtaggactgaggccagacttcctgggatctagtcctggagctagcactaaccagctgtgttacttatctcctataaacctcagtgatcttatcttaaaaataaggtgataatgatccttacctcattcagttttggcgaggattaaatgacataaaatatgttaagagcttagaatatgtctggcacttagtaagtgctcagtgaatttatgatgcgtaaatggacatcagattatgtcagatttgtcaagctagtttttgatttttttttttccaatccctctctgatttttttctgcgtcacatctgttatatgtgccattttgaagctttgtaattttgggaggaagagtaatgggaattgaataatgtgggcagtcactgagctgttactataacaatatttgatccatagccattgggataagaccatgctatcaattgtagaaagtagcattagtaaaacatttcatttctatggcactttggagtttacaatgtattttctaatgtcctgtctaatttgaatacaaagaaaatatgaagtgcagagaaataactgattttctttttgtctcatcaccaggctaggtgtgacccgggtgtgcagcctcagcttggtgatctcacacatcatcaaagcagttctctgcagtacattgaagcacttgttgggtacacagagtacctgttgttaggttaagcattgtaggaagttgtaagaaaagcagctttgtatggccttcgtggccatgtgtatgtagttctgcctaagagcaaagttaaataaacttgtagccaatatgacaacacagcctgatgacagaaaaaaattccccagataaccttaaaactcacctagaaggagcgaggatttgtgtagtgttccggatgtccctttgttttcaccccattcctacgcccgcccagacttacctttgctgtcactggggctcttttggaggctgggaaggattttaatcctgtctggtcctttcccaagaatagcagtatgattgaaaatgtgcccacaagcataatctctgaattggtggatttaaaacaaagttgatgagagacttccaacggcaagtgtgtaaaaagaaaatatctctttaaaagatgttattgataatgaaaagctgagacccttgatactctgcacacggctagtatgggctttatacagattcagagacatccatgtgtgtcctgcttattggtccttaggctactcccgcccgcaaagtgtagcgctgtcttggtggatcctgccggaatgacacatctttttgctttgggatgattgctgggtcctggggtctctctccctgcctcttccccagccctaccctattgcacattttagtgtggcttagctctgttgcctttgtggtggttaacactcaacctcagagacaaagatctaagcaggaaggaggatctattgtgaaccggttggaagttgatttttgaccctaagaaattagttcaccttatcatcagatagagatgctatttgtacatttctccctcatacatgtacatttactctcaaaatttcctgggctagtaggtctctcaaggtggctgagagaccctagaaggtaccagtgtaccactgggccgcatccttaaagatggtgctgtgagggacagccatggaggcccatgtgcgccattgcccttatcccttgggggctctctggatgagggctttctctgtctttgtcttctcttgtcttcgaggtccttcttactcccttgtccaatgtgtgacatcttatcttttcctccatgagctccatttttctgttccaaatagctctagtctgctggtatattgtatttgttttttcttttcttttttttttttttttgacacagaattcccactgtcgcccaggctggaatgcaatgatgtgatctcgggtcactgcaacctccgcctcccgggttcaagcaattctcctgcctcagcctcctgagtagctgggattacaggcgtgcgcctccacacccagctaatttttgtatttttagtagagacagggtttcactgtgttggtcaggccggtctcaaactcctgacctgatgatccatctgccttgtcctcccaaaatgctgggattacaggcatgggccaccgcccccatcgtctgctggtatattatactcctttctctttgtttagttaaattatttctgctttgttttgatacataacagtggtatattagtctcaaccctttggaacatttttaggtcccgatgctatcatccattatgttgaagaggacaggtcaaaggaaagagccctgtgggaccttccctgtgaccatttaggatttagagtcatttggcctggaactgttatttcccagctacgaatccacctacctgtcccaccggtctgtgtctccagcctccacttctacacatggaaatcaggagaggctgcgtcttaaatccttttggtaaaatccagacatttatgacctctacctctcccatagtttaccatgcctgacccacagtagagttcttaagaaatactattgtcttttccccatttcttatttcctgtttaaataaaataaattcagtatttgtctttctagtgtgttgacatgtctcctattctcccaaattcctcaaagaccagtgcagcaatttaccaatctcattttcacattccttcagtgtaataagtgaattaaagccaatttattatccaggattgcctcatttatttcaaaataagctgtgtaccaagaaagctctattccctcagcaagagctaactccagttttaaagctcattctagagaaaaacagacttttatagtttgttttagctattaaagaccccttttaaaaaagaaataggcctttggatgttgccaggggttagaaagctagtccagagactgagaaggtaaacaaagaagcaggggaaaaactgattttgagtgtttagagtgtgtgaaatgtcacttttccccttaacctcttccttaaggaaaaggagagattgttaaagtagtgtctggtcagggcgcacacatgtagaaggtttctgtaactctagggtaaaatacagatctgttaaaattttcatgagtttcttttacttgtcagaagttgcctacagcttagatgatattttcctgatagtttgtaaacttctattgacttctctgtttttctattcgcccatacccatttattttctctttactgcattttactgtcttaggaagataaaacagaaaagcaaaacaaaacaaaaaccccaaaaaactaagtctgaagcagactgttgaataatattactttaactgatgaacagattttcctcccacaaagaaggaaaaagggagaaaattcgtagctcttctctctttttaaagactgtgctggaaaattccaaaatgttatcggaataaaggaatgacttcgggggctcagaacaactcggggaaagacactaaaatttattgagcatttaacgtcacctgccagaaatttaaaatgtgttttttaaagaacaaacatttcatgattttattgtatccttacgacagcctttcagggtatggggattatccccattttacagatgagcaaactgagacctggagaggctaagtaacttgttacggatcacccaggtgggaactgaccgaattaaaatccaacacttcatgccaggtgcggtggctcacgcctgtaatccaagcactttgggaggccaaggcgggtggatcgcctgaggtcaggagtttgagaccagcctgaccaatatggtgaaaccctgtctctactaataatgcaaaaattagccagacatggtggcacatgcctgtaatcccagctactcaggaggctgacaggaggatcgcttgaacctgcgaggtggtggttgcagtgagccaagagcgtgccattgcactccagcctggagtgcaagactgtgtctcaaagaaaaaaaaaaccaaccaaaaaacaacactttgatttgctgtaagaccctctctgtgaatattaaactggtaaacctcatacataatgatgagattagtcatctacagaagtaactcagggcttgtctgtaaacatcctatgctccaaagtgactgcagtgtaatctcaggaaggcaagactggaatgagatcgtaaataaaaaaatggacatctaatacatacattggtctcgtctgaagaaagactgttaacagagggggatggtcagtatggaattgtaaacaggaggtcaaagaggacgaatgtgttatttacacccaccagaacccagggaagtgtggtgagaagcagcaggaactcttctgtctgctcggcaggcgggcagctctgtgtggcggagacatttgcttccactattatggttgaagtcagcggccataagatcatctatagactgagagaaggcagtgtggacaagggcctcagagcacaggctctctaggggagcatgagttcatgttctccaatctttccaactaccatgcatggaagatattagaatgaacttttccccagatgagaaaacaggcatggagaagttacacttgggcaagtcaaagaggggtagagataggcttaaggccagtctaaattcagaactctcttgactacgttgctctatctctctctctctctcttttttttccttgagacggagtctcactctgttgcccaggctggagtacagtggcctgatcggctcactgcaacttccgcctcccgagttcaagccattctcctgcctcagcctcccaagtagctgggactacaggcgcccgccaccacgcctggctaattgttttttatttttttgtatttttagtagagacagggtttcaccgtgttagccaggatggtctcgatctcctgacctcgtgatccacccgcctcagcctcccaaagtgctgggattacaggcatgagccaccgcgcccggccacgttgctctgtctcttaatagtcttgtcattcctgggatgctgccatttgttttcttttctaatggatagtggatcatgaagatgggttcacatgggcgacttgaattctagagagccaggcaatgtcacagcttcctggccagtttgtgcctgttgggggattccccatctttgatgcctttgacttccagtccttgagggacactcacttccctggcaagcactgtcttggactgcatgagtgattttctattggttggtttctgaccgggcgggcacttagctccatgctggtctgtgcctggctgagatatctaagagcagctcattgccatattctgaatcccagccctcaggggagcagccagcacctctgcttcctgcctcctctggcagatggccctgatctgagagtttaagtgatagctatctgagaggagtgattggtagagacagtagcaccttattttaataatttaaaaatcataaaatatgccactttggatacaaaagcttttaagaggcacttaataaaaatgtttagttgctttccacaatgagaaaacattgttataactaaagcacacttcagatatttaagcattaaagcatccccagagacttattcttaacagtaaaatgtattgctttgttcaagatgattctgtaatggagaggcattacagaggcaagaagagacgagaattctttgtaattagtgtgcactgtttgaatgtaaatgagtacttgaaaacagtttgctctcttaaacatcctaagttttcccactgtcgtcttccataaggtattaattggtttaaacagcctctttatttgtaggcagcacaaaggttaacttcagtccagcccctgtctagttatcatcaactccaaatgctaatgctgtttgaattcatcagacagaattgagctttttgtatgtagtcatggcctcttaaaacttacaaggccaggcgcagtggttcatgcctgtaatcccagcactttgggaggccgaggtggatagattacctaaggtcaggagtttgagaccagcctggccaacatggggaaaccccgtctctactaaaaatacagaagttagccgggcatggtggtgcatgcctgtaatcccagctacttgggaggctgagtcaggagaattgcttgaacacagggggcggaggctgtagtgagccgagatcgtgccactgcactccagcctgggtgacagagtgagactcttgtcaaaaaaacaaacaaacaaaaaaccaaaacttggaaagtatatatagtgtctctatatgaaatgagactagagaaattttataaaagaagggtcctcaagtatagataaaagacaactgtattttattataaatgctttcttatatctcagacccaggtaagttacaggtcatgctcagcacctgcccccgtgcatatagcagcaggttgttgtaacatcagcttattgagaatgtggatcactataacataggagtcgtgttatgctgttcttttaattccctcataccagtgcactacattccaatactaacatgtggaaaaaaaatactgaatatccccttgttttttagtaagaccatagagcagaacatttgcaattttataatggttttatttttaaggtcaggcatttaaagtggcacaaagctttgatgtgggcttacatctgagtattataaacatttagcacaaagtaagaacttacttaaaagatgctccagcttccagtgtgctgtttctgtgtgaaatactgaaaatttgggatcattttaaaaataaacacttatctaagttggcatgcaaaatggagcatttagaaagccatgaaaataagcccatgcataaaatatggcattaaaaaggtaactgtgaactttacagatggactagcatgaaagaagctgtcttttgctagggtggatacgagagtttgcagctctttgctgcaaaaaaataagagcagaaacttaagttgtttagttgttttgaaataacagctacacagagggctccttctggttcatccatattttattagggcagcagttaaaaaattcattagagacacccatctgtagctagcagcacccttgaggggggctcagatggtgatcagattttggagtagcactttacactaaaagaaaaagacaatcgtttaggagaattaatagcacaatggagaggggctgcttgatgcatttgaagcatacccttccacatggtttatgaatcttttgctactgaattcctcagccacctgcttcagttgggaaagagagatccaggcataacaaggagagaaaaattggatcagagagttgagactgtattggtcagtggagaacatagatagagtgtctatgtgatccgtgttgggctctcactcgtgtgtgtttgtgtgtgtgtgtgtgtgtgtaaatcacgttggcctcctggggaacttcatcagtacaaaaaaaagcttgtggtcagagctgaggctgccctggtttaccttggccttgaactccacctccctggtggtcaggtccaggtgcctttgcctcatctttattcatgaattgaaaataactctagttattgaatggcaatggaggggaagtgacctctcctctaccctcctagattccctagctgggtctatgaaattgacaacagatagattaacaggagaataggcatagacatttattttttttttttagaaggagttttactcttgttgcccaggctggagtgcaatggcacgatcttggctcactgcaacctccgcctcctgggttcaagcgattctcctgcctcagcctcccaagtagctaggattacaagtgccctctgccatcataccctgctaattttttgtacttttagtaaagacagggtttcaccatgttggccaggctggtctcgaactcctgacctcaggtaatccgcctttcttggcctctcaaagtgctgggattacaggcatgagccactgtgcccagcccatttattaatttttaatattatgtgcatggggggcatcacaggaaaaaatagtaaataccccaaagagcggtgagatttgagagcttatatactgttttcataggggaaggggaggaggatataggttgtgatttttagaaatgtgctgttagaacagcagatggaagataggagagtttgtgacaaagtttgtctgggtgtggtgtcgactcctagtttcatctcctgcaatacaaatctgtcttccctggttgatgaaacttccaggaagggaattcatgacaactgagttccctttggcacatctgttttgggcagataaagggagtttagagaaaacctttccctgcacttgctgtttttcaagtgccttcagctcaaaataatcaatattccaaagcagcatagtttggagtggcttattttggtttccttcagtgactctgtgccaggcatggtatagcacggttaaagtcataatctcatctatccttccagcaatcctaggggtggagtcccatttcacagatgagataatggaagcaacagagaggttagtcacctgaccatgctcactcataagaggcagagctgaatttcatcttctgctattaagtccaggtccataaactgtgtgcatatacatgttttttttagataaactttctattttagaataattatagatttatcgcaaagctgcaaagacagcacaaagttcctttcacccagcttcctctaacggtaagggcttatataatcatggtgcatgtattaagactcaaaaatgaatattggtgcaatgaactaaactacagatcttattcagatttcaccagtatccttttcctgttccccgatccaatccaggatcccacactgtatgtcacatgcatggtttttgacccttaaacacgaagtgggctggatgtcaaactgctgggtggcctgtttctcctcattactgatgaagaaagtgagacgctggtgccatctgtcaccttccttgtggggcccaggactctcattgtctaatggaaaggggaaatcctatgtagggtagaagatttagaacagaggcatggggacaaattttaaatatagaccatactttttctacttgtagtagtttgtagctaaaaccacattcaagaaatagaaaaagattgggggagagagagtattctgcaaagcaacaacctctctagcatcattaaagtttatgatgcatttgaatcccaagtgtactaggatgttaaataggacttttccttaaaacaaagccttccagtcctgactgcctcctagaatcacctggatagtgtcaagaagcaccaataccggaggcccatccctcgatgttgtaatttcatcagtcttggttgtgatctgaacctcagaatttttaaaagataccaccatgattttttttttttttttttgagacagagtcttgctctgttgcccaggctggagtgcaatggcgtgactgtggctcactgccgccttgccttcccgggatcaagctatcctcctgggcacatctaggatgcatgtaatttgcctgtattctgtgaccaacccttctgtgaacaccccctctgtgaccaacccctcctggaatcccagtgtggtttccttggatggtttctggtcacttttttcgcaagccctcttcttctttcaggatttaccttcttaggcggtctcatttaaccctcctggctttcccacttgcatggcatgtgtttccacctctctgtggcccaggtcctgccttggccctgtcctctcggtccccacctggaagccaccctgggcctattcccatcctgtcttctgcctcttcctccacagctgccacactgtctgtacccaagtcccagtggttctgaacttcttcaagctggctgcactcaacactgcctttcacactgtgcttgctgttctctccaccggcaatgacctcaccctcctttttggcttgggaagcctcagccttccagtttactttcctggcctcctgcagtggagttgctcacagcctggtctgcatctgcttgttgacatgtctgtcttccccagggagccatgagctccattgaggacagggaccatgactttgaaaaattaataattaatttttagagatggggttttgctaacttgcccaggctggagtgcagtggctattcataggaggaatcatagctcattgcagccctgaactcctgggctcaagtgatcctcccagctcagtcttctgagtagctgggactacgggggcatatatgcacccaacttgaaaaagtattatcaaatatttcacggttataaaaactgtatttatatataattatgtgtttaatatataattacacataggttttacatgtgctgtttgaaaataatacaatcagttcctgtgtaaccaccacttaagaaatggaacattacccttgaattactatataattgcatgcattttttcctatgtattgtttgagaataatacagtaggcacctgtgtaaataccagcaggcttaaaaatggaacattaccctcgaggtcccttgcacatcacgtcctgttccctgttaagactggtttatcattcttttgcttttgtttatacttttagcacgtatctatctcttgtgctaaaagactgttacaagcagaacagtcattccagttttagtgattctgggctgagactgtagacaattaaataaaaagccaattcagtgtaggattcatgccttccgactgtgaggctgttgtaaggaagtagcgtttgtgggaatgccacccaggagtcaaatctctagcctttgggtgatcaggaggctgacaggaaaacagcgacagagctttgcctctggtggaactcctggtggcctgcagacctgttggcgtctgtacctgcagtccactcagctttccagatgactgaaatgccccaacagggtagagtggctcgcctctccaagaaagagcagttggtgaataatcatgcctgggaaaacaatccgcctggcaaagagatggatggtatccgttggtgaatgtgatggcagcaagcccagtgcaagattctgtggcgattccttgattgacctgctcggttggtggattttgaaagggagtgggaaggactgcttcacttgcgtagaactctccctctctcttgcgctatcttcatatcgatgtctacctttctctttgtgtatatgtgtttataaatatttcatatgtatatttgtgtacagacatatacacatttggatttatatttgtatacattttatattagtcagttttcatcctgctgatgaagatatacccgagacttggaagaaaaagaggcttaattagacttacagttccacatggctggggaggcctcaaaatcatggcaggaggtgaaaggcacttctttattttatcttattgtattttttttttgagacagagtctcgctctgttgcccaggctggaatgcaatggcgtgatcttggctcactgcaacctctgcctcctgggttcaagcgattcttctgcctcagcctcccgagtagctgggactgtaggcgcctgccaccatgcccagctaatttttgtatttttagtagagacagagtttcaccatattggccaggctggtctcgaactcctgacctcgtgatctgcctgcctcggcctcccaaagagctgggattacaggcataagccaccacacccggactggcaaaaggcacttctaacccaaaagtccacagtccaaagtctcatctgagacaaggcaattcccatctgcccatgagcctgtaaaatcaaaagcaagttagttacttcctagatacaatgggggtaccagtattgggtaaatacagctgttccaaataggagaaattggccaaaacaaaggggttacagggcccatgcaagtccaaaatccagtggggcagtcaaattttaaaactccaaaatgacctccagatctcacatccaggtcacactgatccaagaggtgggttcccatggtctggggcagctccacccctgtcgctttgcagggtacagcctccctcccagctgctttcacaggttggcactgagtgtctgcagcttttccaggtggatagtgcaagctgtaggtggatctaccatcctggggtctggaggatggtggccctcttctcacagctccactaggcggtaccccagtagggactctgtgggggctccaaccccatatttcccttcctctgccctagcagagattctccatgagtgcccagcacctgcaacaaacttctgcctgggcatccagccgtttccatacgtgttctgaaatctaggtggtggttcccaaaccccagttcttgacttctgtgcacttgcaggctcaacaccaagtggaagctgccaaggcttagggcttggaccctctgaagccacggcccgagctctatgttggcccctttcagccatggctggagcagctgggacacagggtactaagtccccatgcacacagcatggggaccctgggcccggcccacaaaacctttttttcctcctgggcctccaggcctgtgatgggaggggctgttgtgaagacctttgacatgccgaggagatgtcttccccattgtcctggggcttaacatttggcttgttgttacttatgcaaattcctgcagctggcttgaatttctcctcagaaaatgggtttttcttttctgtcacattgttatgctgcaaattttctgaacttttatgttctgcttcccttatatatctgaatgcctttaacagcacccatgtcacctcttgaaggctttgctgcttggaaatttcttccgccagataccctaaatcatccctctcaagttcaaagttccacaaatctctagggcaggggcaaaatgctgcccatctctttgctaaaacataacaagagtcacctttgctccagttcccaacaagttcctcatctccatctgagaccacctcagcctggaccttattgttcctatcactatcaggcttttggtcaaagccattcaacaagtctctagggagttccaaactttctcacattttcctgtcttcttctgagccctccagactgttccagcctctgcctattacccagttccaaagttgcttccacatttttgggtatcttttcaggaatgccccactctactggtaccaatttactgtattagtccatttttatgctgctgataatgacatacctgagactgggaagaaaaagaggtttaattggacttacagttccacatggctggggaggcctcagaatcatggcgggaggtgaaagacacttcttacatggtggcagcaagagaaaatgaggaagaagcaaaagcagaagcccttgataaacccatcagatctcatgagacttactcactaccatgagaacagtatgggggaaattgcccccatcattccattgatgtcccactaggtcccctcccacacaacatgggaattataggagtacaattcaagatgagatttgggtggggacacagccaaaccgtataagatttgtattatttttatatcacgcatgtgtgctcccccaacagtgttccttcatgcacatggatggtggtgttgaaaatgcactttctgttggacttccaattttaggccaagcttaggcccaggttgttgaattaataatgaataaatctagataaaaatagaatggtggttaccagggactggggcagggggaaatggggagttaatattcaatgggtaccatgtttcagtttgggaaggtgaaacagttcttcaggtgcatgatggtgatgattgtacaacaatgtgaatgtacttaatgccactgaatgatacattgaaacacggtaaaaatggtaattttatgttacgtatatgttaccacaattaaagaaaagtaaaaaaaaaaatcatagggaaaattcaatggaagcctcaggaaatggtaggggaggtcaattccaaaaccacatacattctaaaatgtcagaaatggtcagttagcaaagtaaggattaattagattttacacttgtatgtctttgttgacatttctgggaataaagagagaagagtgtgataattcctcttctatgtcagttctagaaccttctctttgttccttaccctggtgcttgtatgagtatgtacaaatgtgtgtgtgtgtgtgttgtgtttgcaaacatggacaatggcgtgtgggtttgctactctatttctagtatttctgtgccaccttattaataggagagctgtgggatcaggcctctggatgtaaccctgtccttccttagtgcttctgagttcaaactgactaactcacaaaatgcgtctgcatcgggactgacttgtggcattcattttctcaaagggcaaaaaaccttttgtttctggtagaaattaaagatgtgtttgtgacggccctcacttctttttcaccaaatgcagcacccttcttccctttaatccgatgaggtggttttatggggtggcacataacttggagctcatgggaggccttagaaccattaaccaactgagctaaccaggttcctccattagtttaatttcaaattgaattctccttcctccatgattgaaagagtacattcaattcctgtaacagtttttatatgcctgactgacatcccttcctaaagcataagcagtttgagggcagggatggtgtcttgtttatgtctgtaccccatgtatcatctagtgttcaataaggaattgttttatggaaatggattacatgattaaattggaaatagaatacaggttgatttattccacccccagcttgccttgctcactggatgcttattacagtgacctgaaggcacttcagaagacttaagtgctctctgaattattgaaggaagatggactttggctcagtagagtgtttgtgcttagtgcctattactggattctgattctttggaaacaaattaatccagagggatatattgtttctttatggttctgaatatttggttagcctgaatgtattaagatcttacaccccaaccatgacagatgggattaaaattccttccctgaaaagaatatattcctttatgcttccactataaatttatatgcaagtcatgttttgtaaagtcgtgttcttctcttgctatttggtgcattccctgcagcattctcgaggtcccagcattttcccttcaggagaccttagaattattggggtacggggcagccaagtgacctgcccaagcccacgtgtcttttttttttgttgtttttttgagacaagagtcttgctctgtcacccagactggagtgcagtggtgtggtctcggctcactgcaacctccgtctcccaggttccagtgattctcctgcctcagcctcccgagtagctgggattacaggtgtgcaccaccacgccaggctaatttttgtatttttagtagagatggggcctcgccatgttgcccaggctggtcttgaactcctgacctcaagtgatccacccacctccgcctcccaaagtgctgggattacaggcatgagccactgctccaggaaaaaaactgagtatcatgttttcttaaactgcatgtttaagatttcatatttaaaaatgaatattgtctggccaatgtgtattttaatttcttctctgatatactgtaaactaggattgttttaggaattataaggacctcaggaaacttctgtgtagtataaactggaaacaattcatatccaccacagaaaataattaacagtgctgggtgttaacaatacttaggggggaatgagtgatggagggaatgagtgatatggacaattggtgaagccctgttgactgggtgatcaggagaagggagctgatgggggagggattggaagctgaaggctgagaaggatttggatagatgaagggagaacataagagggagggctgacaggattcttgctgatccggctggttaatattggcttgccgcaattttccttctaagctaggtaaacatatatttccaggcatcctatttggactgtgtatagagacccattgacatctgggtctgttctaagctgctttcacttccctccaatcagagcttgttgggctcaataaggtggagatgggggtcatatattaccagggcaagcaggtctgtgcttcagagaggaagtaaggcatcagcgcttccctctagaattgatctgttgcggaacaagagtcctcgagcagcagagaaagctgcgccaggctccctttccctgctcagtcgttcgttcctggactagatgggtggaacgaggcatctctgggtttcacagagcacagagggcacggcttgtttcctaaccgggtctcaaaacctgcctgcactttgggctttttcttcaccttgccatatgttgcttcctgcccttttgaacctccttccggagctgattgcacttatgtgctaggaaaggagtatttgtcttcaaggtctgaatgcatcctaatccttattgaactgcaaggtgtgatggcacgacttggatatgtaagtgagaattgattctggtcacaggggatgtcataagtttcctcaaaaaataaaaaagaggaaaaaaatagtgagaaaaaatggcctttcgttatgggaaactgggagtttttcctacagatttcattcttgccttatatgggtttcctggaattcttctagcagattccagcagtgccctccggatctgccctctgccctctgagggttaggattcatagtgtgtgacagtctttgctattcaggccaccttctgggaaggccagtggccaggggatggttttcatgagccctcagcagggtgcagaagccaggtggttcccatatctcattcccacttttggtaaacacctctcttatgtttgccctcctgggcttgttgcttctggtccccggctcatcacagcttcccagggccccggtagaaacaagggttcacagtgggtaacctcactgtgctgcaactggaacctggcttgcaggatttcaggacctttggttgagtggttttagaaaaggctactcaggggctgggcgcggtggctgtggctcacaactgtaatgccagcactttgagaggcctaggcggggggatcacctgagatcaggagttcgagaccagcctggccaatatggtgaaaccccctctctactaaaaatacaaaaattagctgggcgtggtggcaggcacccgcaatcccagctacttgggaggctgaggcaggagaatcacttgaacctgggaggtggaggttgcagtggggtgagattgtgccactgcactccagcctgggcaacaggagcgagactgtctcaaaaaaaaaacagaaagaataaagaaaaaaagaaaaggctattcaggctgaagtgccctcaggccttggaaaagaaatgaaatttcaaacaaattattttctacctagcctttttcttttaacttcagaagggttatctggatgactggtatttacatacaaaaaatagttaaaagtctttttaaaccacagacagtataggtttcactggactcatttttcaagatacgaaattgttgaattgttttcctttggtaattgaagccagaattcagtgttttctctaacttcttttcggattctttgctctctggagaacgttttgcctgctttgcaagggggtatgagtagtgcgtgtgcctgagggcctctctctgccccctcctaacgcctggccaccctgttccgactgctgcccctgccggtcgggcccggacactgcagggagcctcacatcctcggatgacggattccttctgtacatctcatcacatccttttctactggcttcaacttgcatggcctctgtcttgaagaaagaaagaaaaaaatgaaatgtttcttctgccttcctgtcattttacgcattttacgctgatatacttgtaggcaaagggaattgaaagggcatgcactttggaacgagacaagcctcagttcaaatccgggctttgggaaaccatgatccgggagttctggggcaaagtaaggctttctgagctttagctgtattattggtaaaatgggaatagtaccgatctcctagggttatagtgttaaatgcctcccttcctttctttactctgacttcttccaccaccacctcatggtccctgcttccattcctcccttccttgcaagcttccggaattctttgtaccccgggcagcaatagcccttttggagctccccgcaattggcaagagcaagtcactgtgtgagcaagtcttgggctctgttatcttcagatgctcaagtcaggaaatagggggctagaggtcattgtgctcatttccccagagattatcaatgccacccccaccccttttaggagatggcatgtgccatgatcgtagctcagtgggatccttaatgcctagtgatctcggcttaacaggacaaagattccaagcccatgtctgttctgggaagcaaagcaggatgtgtgggcctggagtgaagtttgttccatttctcgccataggccatggtatgattacagctgtgcctagtgctgcctagttttactttcatgcctgatttgcaatgtggcagggtcctgagatgagagctctgtgtgggccagtagagtcaagagactttgtcctggtcacttggctacttgcagggggttctggaaagtcaagttctctgaatctcagttgcctttaatataaaaggaaagctatagtttcgggtcggattgattcacatggttttggtcgggagtgaatgaaattaatgtaaattaaaacacattatgagtagcaaagtgctatgcaatctaaaaataataacattttaatcactcttatcatcatatgtgccaggcactgttctaagctgtctacaaatagtaactcatttagttgaatgctcacaaccaccttatgagagagctactgttaatatcaccactttactgatggggaaactgaggcacagagaggttaagtaacttgtggaaggtcacacaaccagcaagtggtacaatcagggtttgaaccagtcaatgaggagtcagcatttgttattgttcctattcctatagcatagctgggaagggaatgcaatgctggtttggagaacacatcaagcaggcctcctgtcatccactgagtgagatgagatgatggccatacattgcggcacagccagctatccatggtctgcagcaacagatcagtcttgcagggacatggatagctccgctagtgaacattcacatgttcaacgaatagctagagtaaatagttggatctcatttagaggcatgctctggcattcctctttcacgtcatttgctttccaggcccactccaggatgagagtactgaggtgccataaaagaccaacaggcaagatgttggagggttcaggagctgccaaggttgtgttcatgctgacctgttggcatagcgtacagcagtgccagctgctctgctaaaccgaggagctgagatgctgtgttgatttctacatgttccaggcaaatacttcctgaggattgtcaggatttacataatggattggccctgggaccactgagccagcatctatctttgacaggtgtactgagagatgacctttaaacctagggatgttctccagatgcagttccagctgggccagtaagatctgcatgtttatggtgctgttttttcttttcttcccaggcagccgggattgcttaccacctgcagcgtgctttcggaggcggcggctggcacggaggccgggctacatgagaagctcgacagggcctgggatcgggttcctttccccagcagtgggcacactgttccggttcccaggaggggtgtctggcgaggagtcccaccactcggagtccagggccagacagtgtggccttgactcgagaggcctcttggtccggagccctgtttccaagagtgcagcagcccctactgtgacctctgtgagaggaacctcggcgcactttgggattcagctcagaggtggcaccagattgcctgacaggcttagctggccgtgtggccctgggagtgctgggtggcagcaagagtttgcagccatggatagttctgagaccctggacgccagctgggaggcagcctgcagcgatggagcaaggcgtgtccgggcagcaggctctctgccatcagcagagttgagtagcaacagctgcagccctggctgtggccctgaggtccccccaacccctcctggctctcacagtgcctttacctcaagctttagctttattcggctctcgcttggctctgccggggaacgtggagaagcagaaggctgcccaccatccagagaggctgagtcccattgccagagcccccaggagatgggagccaaagctgccagcttggacgggcctcacgaggacccgcgatgtctctctcggcccttcagtctcttggctacacgggtctctgcagacttggcccaggccgcaaggaacagctccaggccagagcgtgacatgcattctttaccagacatggaccctggctcctccagttctctggatccctcactggctggctgtggtggtgatgggagcagcggctcaggggatgcccactcttgggacaccctgctcaggaaatgggagccagtgctgcgggactgcctgctgagaaaccggaggcagatggaggtcagtgtctcttccacctctgtggcccgagattgtcgtgagctcagattagcactgggcagacggcaggaaacgaggggttctgggctcaactgacttcctcctggaagctgcagcagctccttttggagccggctgcacaggatgttgctgcacttctgtctctttgaattggacacagatctactctcctttttgtcttctctgtcacttaggtgctcagatttgctctccattgggccgcaggctcctctgcaggccccggcttaggtgagacgtggttcatgcagcccagctctgctttgagacaggaaactgggggcaggggagattgagctgggtgatgtttggaaggacttgagagatacaaaaatggggatgccctctatcagggcgatcctgctcttcatccgcttcactcattcccttccatcctgctgcagtggctgctgccttccacagggtcgggagacttcgcttctggtcattgaacctctttggctctcagtttccgtatttagagataacaccaactcataggattgttctaaggctcaaatgagaatgtagctgctttggaaataagtacaaactggagacatctaaggcccagccttatgatgatgctgtccatccagttatctgagaggtgggtatagccggaagtaggtagggttcctctacccacaaaagttcccagagaagcccaggtagagatgctctgtggctcatctgttgccagactgtattttaatcctggtgtgtgtgtgcatatgtgtttgtgtgtgtatgtgtgtgcatgtaggtgtgcctgtgtgtgcgtgtgtgtgtgtgcatgtttgtgctgtgtgttcatgtgtgtgtgtgcatgcatgtgcgagtgtatttgtgtgtgtgcactcatgtgtttctgcgtgtggtgtgtggatatgttcatgtgggtagggaagtggagcacccactcatcaggcatttgggaggagtaatctgcagaagttcatgctcattccccgaaagagcatctcccatctgttctttatctatagtctgatgtttctagccctgtccctgtttgccctgtttcagccctcagggacctcagcccagccctctgatttattatgcagagagggagtgaggtcagagcacagatgcaggcttgtattctgggtgatgtgtggagtcttccagttagtcattgcctaaaccagtgccccttgtctttccccgaaacccgttctgaagggcctccaatattggttgatttgaatgcatagaatctatccagtttcttaggccagaaaccacaaccatcttccacacctccctctcccttgttccacatctggctggcctccaagccctctcagtcctactgctaatctgtctctcatcaccatggccgctgccctggctcagatccttgttatctttcacctgggttttgcaagagggtctaccttcctgcggtgtttctcttctccagttaattaaactaaatgtgatcatatgtgcaaagtgcttcagacagggcctggcatctagcaagtacccagaaattaaccattgtcatcattagagaaatagctccaatttagagagtttgagtcaaaagcaaatgaagctctcccttctgtccatagctcaaattaaattcctatcttatctcaaatggtagaatctggacacactttttctttagtgtaagtattgttgtctatggcagtcccacagctgggcagggaaaaacatgacactctcttcaattacactcatgtactgcataatgacattttggccaatgacggatcacatatatgatgtgacagtggtcctgtgagattatcgtactgtgtttttgttgtaccctttctatgttcagatatgtttagatacaacaataccttaccattgtgtgacacttgtctgcagtattcagtacagtcacatgctgcacaggtttgtagccaaggagcaatagactattccatctagcctaggtgtgtaatgggctacaccatccagatttgtgtaagcacactctacgatgttcacacaatgatgaagtcacctaataatgcatttctcagaatgcatccctgtcattaagtaacgctaggctgtacttgagtatctgttgtgtgacagcggaattaacagagtagtgggaatgacagaaataacacagtccagggcataggacttacaggaaggcagagtttgcctcaataggaggaagaacctcttgacagtgggaattgtctgtgatgaggtgggctggtcagggacttgttttcccatggtgcttacacagaggccccagactgctcactggggttgcggctgaggccttcgggacagggcagaaggtcggtgaaggatctccaaaaagatcctttgaaagagtaggatttctagtgtttgggggccttattgatattatattttaattccttaacctcctctcgcttctacttaagtaaaaatgagaatctcaggaatttaagtttcagcttcttctaaaagatggttgatcctcagtgtttgtggattctatatgtgtgaattcgtctacttgctaaaatttgttgttaactccaaaatcagtactcacagcacttttatggtcatttttcatttttattttattttttaagagacggggtctctgtcttccaggctggggtgcagtggtgtgatcataactcactgcaaccttgaactcctgggctcaagcgattctcttgcctcagcctccctagtggctgggactacaggcgcatgccaccatgcctggctaatttttttttttttttttttttgggtagagatgagggtcttgccacgttgcccaaactggtcttgaactcttggcctcaaatgatcctcctgcctcagcctccaaggtactgggattacaggcatgagccaccatgcctggtggtaattttgaacctgcacagagtggcaaaatatttgggtcacctgatgtacacgctttctacttaggtcaaacaagttcagaccagatgacattctaccttctctctcatactacaaactagtatcctttttgtggtctatttaatgccatctttttttacatttttgtgctctttattggtgagttaaccattgcaaaagctccctaagcatagtgctaatgtcatctagtgctcctaagcatgagaaggctgtgatgggcctgatggagaagatacaggtgctccagaaactttattcaggcatgagttagagtgctgttggccagagtacaatgcttatggatcaataatacatattaaataagatgtttttaaacagaaacacacatagaacaaggtcatgtgttgaccgatggaggaaggtgttgtgaccaggggttcacaggaacctaccctgtatttctcttaggagcaatgcttcattattccctaattcagtattcacagaaactttatagaacataactacagtactgtgaataaggagaatcgactgtgaatattttatgctgtttagaaatcgctgcttagcgagatttccaggggttgcatgggactgagaagatggtaataaaggtagttggtgaccaggcatgcagaggaggggaagtggagtgggccctgcaaggtaggctccacctaaggccatggaaactggtgaaaaatgaaggactctgcctgtagagtattataggacgttccacaggcagggttgtggcacagtgcaagacatggccactggggctgtgcctccagcaaagacgggtattcagacatatctcagggcagtccattcagggccttatagagatcactggacgaggtgggcatcgtggggtgggctttggctgtaaatgaatttttttcctgaccttgtttcctgcatttcttcagcttctgttctaataaatgtttaatgataccatcatttgggtgtggcgatggtaatgctatagctttatgtggccctcaaaccattcacacagcctttcttctgtccctaatatataggactaagttactggtaaactttgcagttgtaatatagaacaattcaaagacaaaggggttaatatgattattcattcattctttcattcattcagaaagcatttatcaatgacaacgagtacaatgccttatcctaggctttggagattgtattaggacaggctagtaacaggcactacgttagaggctcaacacaacaaaattgtgttttttgcgtatgcttcatgttccacagagatttttggggggcaagaacccagcctgcaccatctgaacatatgatccccttagtcacagacttgaggaagagaatgttagggagtcctacaagagcgatcaaatgcttcagcgtagaggtaaccccatcactgccactcataccctgttcagcagaacaaggagagaggcacttgtactctttccatgtgcccaaagcagtggaaaatcaagtcagtgtaagtactagcatcctatacatggatgcaaaatagttcttgccccccagatgctcaaggttgaatgatgtgcacagataaaaccaaacaaaggaaaatgatggctataacctggtgcaataagtactccattcttccagtgggtcagaaaaaaaaacccaaaaaacaaaaaacaaaacaaaccttggcatcatcctggtgcattttcctcagaccccacctgtgatgtattagcaaatcctgttggctctatatttaaccagcggtcttctgaatataaccggaatcagatcacatctcaccatcttcaccattgccaccatcctcactatcatccaagctcctgtcatctccttcctgaatgttcccatagcctcttacctggcctcccttcttctgctcttactaacagcagccagagtgaaactgtttaaaacataagtcagatcatgtgctcctctgccccaaactctccagtggcgccccatgaacttcagagtaaaatcagaacttttaaatggtcttcatgtctcttcttgacacagtcctcattacctgtgtgacctcattctctacagttttcccttacatcaatctgccccagatccagtggcattcttgctccctcttgcttttcatttcactttcacttcttgctttcttaccagaaacacttctgcctgagcctttgtactggctcttccctctgtgggaatatttttctcccagacagcctcgtggttcactcccttaccacttttaaatctttgtgtaaatgtcaccatctcaaggagatcagatttcaaattgcaacctctaccctctaccagcatccctgatccccataacgtggttctcccttttcctttttcatagcattaatcacttgctaaggtgccataaaacttacagttgacccttgaacaacacgggtttgagctgcaagggtcacttatatgcagattctcttccacctctgccacctctgagacagcaagaacaacctctcttcctcctcctcctcagcctactcaagatgaagatgatccactttcacttaatgaataggaaatttattttctgttttttatgatgtttttcgtcatctagtcaatgctgaatttttttctcaatgatttttaaataacattttcttttttccactttacttttattgtaagaatgcatatataatacatataacaaacaaaatatgtgttaatcaactgtttatgtttttggtaaggtctctggtcaacagtagactattagtagttaagttttggggaagtcaaaagttatacacagattttcaactgtatagggccggggttggttcccataatccccgttgttcaagggccgactgtattatgtttttgcctagaatgtaagtctggagggctaagcattttatgatgtatccttgttacatcaacacaatacaaacagggcctgataactaagaggcactcagtaaatatttgttgaatgggtctatgaatagaagaagcaagtacaggtcacaatggaggtatagaggagggacatttaacacagactggaggagacgacacttgtgctaggggttgaaggaaatgtaggtgtgagccaggcaaagaatgggaggaagatgtttttcagggatcaagcccaaatccattcattggtaggccaagaattcattgtcagtaaatctttgggtctcctgttgagaagaacaatgattgtattagtcagttctcatgctgctaataaagacgtacccaagtctgggtaatttataaagaaaaagaggtttaacggactcacagttctacatggctggggaagcctcacaatcatggtggaaggcaaaggaggagaaaggcacatcttacacagtggcaggcaagagggcgcttgtgcaggggaactcccttttataaaaccatcagatctcatgagacatattcattatcatgagaacagcatgggaaagacccacccccatgattcaattacctcccacgacatgcgggaattatgggagctacaattcaagatgagatttgggtggggacacagccaaaccatatcaatgatgctaaatcaacccattggtaacactcagagaagtaactggatcactgagtctccatgtgggttaaataagactgcccttttctgtaatggaaaatatttgaaccttagggcttctcagaagggttttgtgagagctttgccatcattcttactcaagccttcaggacagcctgctgagcttaagttcatgctctttttctcttggtttctctgccaattttggtgtgtttaccttcataatttaaatgtgaggtttagaacagagaccatttggtcaggaaatttgtattccttctcattatgcatttcttcatgcagatgagggcacagtgtgatgtttttgtttaaaataaaataacattttaactttttatgtggatgttatgctcaaattacactttttctttacatagattttttttggagaaactaatgcatctggcattgaaaaaatgtgcatttttgttttttttttaaaaagagaatgaagaagttcagttttgaaacagtttctaaatgttcttagttttcacaaaaatgtttgcttgaattctattgtaattttttattttttcccctttaaaccaacataggtaatatccttaagattaaaacttcagaaacttcaggaagatgcagttgagaatgatgattatgataaaggtgagttttaatttgtttattgattgttttgtcatcatgtcccaattttctttccatctttactcatatctaccttttgaatcccaaaagaattgtacaatctgttcctctgatcatctctaccagggaatagttgactcttttacagcattattgttttgtagatttcaaagtacttcatgaacattaatcctttgggttataaatataaccttatcaattgtccagaaacacttagcatactcacacaataaaaattatattagcttgccacctgtctgcccatggtgtgatgtatctataatccacttgttcataaaaaatattcgtctgacacctatgatatgctagggaatatgggagacaataggaaagtaagacagacatggtatctgcccttgtgatgccagtaaacttaagccttcatggggctctctgacttcataatttccagaaccagagataggaaatgaggtgaatttgagaaatgtcagactgtgccaaagggggtcacatgcatcaaatttccacatacatggcctaaaatacccaagagaaaaagaagttacaacattagaccagagatagagggactgatctgaggccaggaaaacaaacaaacaaaaaaacaaaaaaaccaattaaaatgaggcaccaaaatagaagttgggctgcaagcagatgagggctgacatgggggttgaatgggcacagggtagactgagtcaaaggaaagctttcaggtatggttgtcctgggaacaatcctgaaaactttagatgctcattgcaagatctcacacccatttctgctgggtgtgggaaagagaaagggctgaaaatgacatgtagattcccctaggcacctactaacttgatagatactcctgctattgagcaagttaggacacccaggattggtatggaaatggaatgtaggtttaaggattcttctggaagctggttagctttaaggcatgggtcttcagcatttagcccatgtgacattctcattgtatgtgtcatagactgttggaattagggcactatgggaataagataagtgatttccaaaaggaggtagaaaatcctgttctaggaaatgctgttgcatgttctcattacctatccattgcagttgggtttagaaagtcacggggcatgggaggaagggagaaaggactggagacagaggagggactcttgacattctcccagtcctccttctacaggccacttgatttcataataacactgggtggaggatgagttgcctgagagaggaggcaagtcggaggcaggggaaggcacccctcaagcccagcgtcagtggcttcagcccgggcacagctgtaggcagggagaaaatgagctattcctgggccagggctcacctgctggatttcatctatgagagataattacagctagttttgaagctgcccactattgcacagatttatttttattaccatgaattgagtcctggactctctacctttaatgacactgtaacacataaagcttacaatgcagtgaaaaagtaggccaatcaggccctagtttgtcccctgctcctgcttaggacctggtgaactttctagacttggttctctcaatggcttcattaaatggagacctcacttctttaatcttttctccaaacattccgcaacacctaagggaatggggtttgagaggatacacctcatcagggaagctcaaagaatacaggcatcttctttagtgtttctgcctttttctgttcctgttggtacctcactacttactacatcagaagtttcagggtgggctcagcattctgtgttttcccaagccttcctggtgactggggtgtgtcctgaggcttgagaaaacactggtgcagagtttatgctagtgagcactaggcctggggggcagcagccagccaagccctggaagaggggttgagtctatgggttgtgtccttcctgatccaccagaaatctgtgcagcagacaagcatcctggtaggcacaggacacacgatttacatgccactccccttgtcttcttcccaatcccacagacccgattcagtgtgttgagaggtaaatgttcttgtggaatatgcacaatgcctggcatataggaggcaggccctcagtaaatgtggtgtgagggaattaattaataaatgacttgccctctgaatgcatggaggctatggatggcaagctagagtgaatgaggggaaagcactcttgccacctgaaggtgggcttagttctcagctcatctgcagtgcccaggatggggggtgggagtgggtgaagggaaagatctttgcatagaaattggcttatgtgaaaaatatctattaagtatccatcgtatacaacagcacttctcagactttaatgtactgtgaataacctgggttggtaatggattaaaatgcagattctgggctgggcgcggtggctcatgcctataatcccagcactttgggagtccgaggcgggtggatcacgaggtcaggagatcgataccatcctggctaacgcagtgaaaccccatctctactaaaaatacaaaaacaaaattagccgggcgtggtggcaggcgcctgtagtcccagctactcgggaggctgaggcaggagaatggcgtgaacccagggggcggagcttgcagtgagccgagatggcgccactgcactccagcctgggcgacagagcgagactccgtctcaaaaaaaaaaaaaaaaaaaaaaaaaagcagattctgattaagtaggactggggtggggtgggagactccatttctaatgatctcccaaatgatgcgcatactgcgagcctgtgagccacacttagagtaataatggcatataagaaatcacaacaacgccgtgtttaaggcatgctgaatgccgtcctcaagatctgcatctcaaggagtatgcagtccaggaggggaaactggataatacacagtaagaataataaagctatacataatatgtcccttaaaatacagacagaccaaggcgggtggatcatgaggtcaggagtttgagaccagcctggccaacatagtgaaaccccgtctctactaaaaatacaaaaaattagccgggcatggtaacaggcacctgtaatcccagctactcgggaggctgaggcaggagaatcgcttgaacccgggaggcggaggttgcagtgagcagagattgcaccattgcactccagcccgggcaacagtgggagcgagactccatctcaaaaaaaaaaaaaaaaaaaaaaaaatcattaaaaaaaaaaaaataaaggcagacaaagacagtcccaaaaagggacaaatgacttctgccagagatcttggggtgggtgaagaatcaaagtagtggaggaggaggcagtttagatgggtcctgaaggatgggtttgatgcaacagacgggggattccggcaaagagaagagggagaaagggcactgttaccatgagccaccatcccaaagttaggcttgaaaggagacttgcggctgactatggtttgaaatggatcacaaaagggctcagtacttggacttgtcagtgattggtaaattattttaaattgatcactaagtcattaggaaagtttggaagacataaaggtagtgaatttgttatgagatttgttcaaataagatttgaatacaatttcttctctcatatagtttattgagggtaactattaaacattttaagaattgttgagttttttttcatagtttttacttgaatttgctcctttttctctgttaggagcagctgtgcagccctgttctgtctcaggggaaggggtctgccggaatctgagaggtttgccagaagaaatgagagggtgaccttatctcccttggtttttgctgcttttttcttttgctctttctttctttctagtttcactcataaaaatgactttgtgttccaaagaaagaagcagttggcacagagtagagagttccatgttttatctcatcaaagtgctggcaaatttccccactaatgccttgtgggaaaaccttctcaggctctaattacatctctccatcactagggaagtaaagttaatatttccttatattcttgcataaggtgggagggcttgggagaaaaagaataaggctttcattaatagcatttacatagcgtccttctccaagaggattcattagattcattgcattaatgcctatcccgtgcttatggtcaggtgaggggcaagtttgagacctcagagtcctgcagagagaggaactgtggtcagtactggagataaggattccagctctgacatgggtggggcagagaaaaggtgggcgtgggcaacaagtttctatgtggttactgttctagttgttcctgcacctgtttgtgctccataatatccccctggctgctcgtgtcccatgtccaccagtgaccatgctcacttccacttccgatgtgagcaaggagagattgtgaaaaggaaggaacacaattttgggaactcagcatttcagtgacttatatcaatgtgacatatagagcagctggcttcactctgcttgtttagaatttcctttttggagtaaaagtagccagcatcatattactttctctatcctttgtctcaactcatatccattatgacagaactctagtataataaacatttatatacaatgacagacattgaaagaaaaatgatggtggcagaggccaagcataaaaacactctagggtgagtcttttgtctaaattaccataatgtccctttgtctgaattatgtcttgagcaagatttctctatcctcagtttctcgtcactgatggtgtgcaaattacccaaccagatacccctttccttcacagggaacctgccttacacctcccatagggtttggtgtctcagtggcttccaggagcctggcagttagaaccagaatccctgccacataagcgttgatgtgactgaacacagcacaaccccagagatttccttttccctgcgtttcattccagtctagaaagaagaaaacaagattgaatagaatcggccattcttatatcctcaggactgccagaatcaatgggatgtggatgccatctgggggcccatggaacataaatgcttttcttggcagcctgtatcattttgctttctgacttaaaaagtggactgcaattgaaatctgctcagagagacaggtccagcaaaactgtcactttataatgtctgcacagaaaaaaagcaaacatgaccaccagtgcaatttccacctgcagctcccttgaacaaggcacttctctccctgcctgcacaccaggactttggagtgttcttgtctgtgctctatagagctttcccttcctttgctgtgagatctgcttgctatatcaccttgtcctggtatactaacaaaatctgctgattaaaacccaaatcaacagcacaaatctcaagtatgtgtcatgagactcactacatccttagcacctatgaaaaatgccaacacttagacctgcaaacacaaatgggaaatgctcaaagtcaccattggctatgatctctgcccttaatttacagaattgtaaattctcctgcaaacaagaaaagaagctaagatagtgcaaccaagtaaaagaaatgcattttatgtttcctctttttatgatatgtttgttttattagatagctgctgctctggtgccaatcataacatcaaaagacacaatcctgaatgccatcatcctgaatgttgaaatctcccaaaattaaatccctaaaaccccaaattcctaaagtctaaatccctaaagtctaaaatccctaacatctgcaatcctgaaaaatcacagtcctgaaagattaaaatcccacatgctggaattctgaaaaccaaatgtggggaaaggatttagtgagttttcagttgtgtcatgttagttgcatcatggtaggtggaactattacctttttattgtctttatttggaaattaggtatggtttaagaagatgcatataggtgcccagctgacaaggggtggacttgtggacttaattttaagtgtcaacttgattggattaaggaataccttgaaacctggtaaagcattattttgggtgtttctttgagggtatttccgcggagattagtatgagtctgcgtgtactaggtagggaagatctgtgtttaatgttggcaggcaccatccaattgtcaagggcccagagaaaacaaatgtagaaggcaaactggtctctctctgagaaatgagacagactttttcctgactccatggacatcagaaatttgactgcatgaaagtgcattataacaacgttgactttgtgtgtaagcactgtgcgtatacataacaatgttgggatttcctcaatagatgaagagatgtttggacatcggcatttgtgaaaaataaaatttcttgagatctctgctctctgggtggctgcatacgaccccctttgcaggtctgttccatggtgggcacattctcattcgttgcctgattacatcacgtgattactgtgggaagaattgtcactatcattggttttcaattgaggtcacggaatctgctgagagggaggaccagctgtgtgctctggccactctgtcaatttgtctcccatccctactgggtctagagcattttgtgtcccactgtggaagactgagctttgtagacagttgaggacaaaacttagctaggaagtttctgacttctggaagctcttatttacatgacagtgaggaaaggaacagatgagcgctctacacttggaggtagcaggaaaattttccacaattttatctaaaaaattagtctatttttatctaaaaaacaaatgctaattaggaaattagctcttgtgttaatcttcagcattgttctcagaagagcataagcttgtatatctgcttcctcttactttaagtaaaaacttaaaaattgggagatgggctatacattaagacaaaaataccataggaagagaatatgaacaaaatgtcatttatttagtttggttgcattgtcttagcttctcttcctgtttacaggagaatttacaattctgtaagttaaaggtagagatcatagccaatagtgactttgagcattgcccatttgtgtttgcaggtctaagtgttggcatttttcatgggttctaagggtgcatgcagtgagtcaagtgccacctacttgagattttagctttgtgcacagatgcgaaagcttattggcacctgatgtacttccctctcattcacagcataaaatgtgatttcacggtgatgccttttctccttggctttgcatctgggtacacgcttggctctttcttaggtcttggtaggatttcttggaacccctgcagctctggaggtagaagcacagtggcatgaacattccttcctaactgccatgtcgtggtgtgtttctctctgggaatgggaccatgctgctttgccttccctgcctatgaggacatcagtctgtcctataaggatcacgtggaatgttgtcatggtgcattattcatgataaactctgacagcttcaaggttaggtgtgatgctgaatacaaaacaccaagccaagccaaaagaattttttttctctcctctatgtcctctccctaaatggttcttagttgaaacttgtacatgatttcctactagctgagctgtagcaggaagttgtgccaacagtggacacatcttattcacgttttatgcatctgcctatgagaatctgtaagagacacaagctgttcatgttgtagagtccggttgatgaagcagaatgtggttcaggaagtctctcttgcgcttagaagactgattttgaagctgctctcataggttttctgcttcttctgccctcttagagtggctaggaggctgcctgggattccaggtaggtcttggccctaagacctcagctgctccatagaaggtggtcagacaggatgaggcagtgacttcgatcatctggagcctcacacctgtaatcctagcactttgaaaggctaaggcaggagaattgcttgagcccaggagtttgagaccagcctcggcaacactgtgaggtcccatctctacaaaaaaatgacaaaaacaattagccaagcacaatgtcatgcacttgtgttcccagctactcggaaggtggaggtgggaacactgttttagcttgggaggccgaggctgcagtgagctatgattgtgccactgcactgcactcctgcctgggtacagagcaagaccctgtctcaaaaacaaaaacaaacaaacaaacaaacaactcaatagaaatgaaaaggatgtgctaatgatgagatgcaaacccccaaattgacatgtaccttcccattacaacaattttaggtccaaactatgcatttggtgcaaatggttgatttatccttaacaggaaggatgtcttagtctgcttggactgccatggcaaagtactactgactgtgtggcttaaacaatagaaacttattgtctcactgctctggagattggaattctatgtcaagttgtcagtagggttggtctcttctgaggcctgtctctttggcttgtagacagctattttctccttgtgtcttcacacagtcttccctctgtatgcattggtgccttaatctctttttataaggacaccagtcatattggaataggatgcatccttgtgacctcattgaaactgaatggacctctttaaaggtccagtctccaaatacaattaaattctgaggtcctgggggttagaactccaacatatgaatattgcagggggatataatttagcccaaaacaggaagcctaaagggctcaggacagagctaaatactaaacacattcaggtatttccacaaaatttgaataatttagtttgactatctgtggtcattgtggtcatatgtagacatttgattgaaacttttttttttttaaagcagactttttgacacaagtaagttgattcttcccacaagtgaacttagctgtttttcacattttgttttattgcagagcctggctcttaggccagtatatcatggtatcccttcacacaaacaactatctactgaatatctgccagatttaccatgccatggtggacaaactatgcataaaaaaatagcccaccaccaaggagtatacagcctagttggaataaaacataaatagtacaaatatgtgaaacttcagctaccattagaattgattttttttttagaattgatgtttatttttgtatgaggacatatttctttttttttttttttttttttgagacagagtcttgctctgttgcccaggtggagtgcggtggcgtgatcttggctcactgcaagctccgcctcccgggttcatgccactctcctgcctcagcctcccaagtagctgggactacaggtgcatgctgccatgcctggctaattttttttttttttggtatttttaatagagacggggtttcaccgtgttagccaggacagtctcaatctcctgacctcgtgatccaccgaccttggcttcccaaagtgctgagattacaggcgtgagccaccacacccggccatgaggacatatttcaataggcagagacacaaattaacctagtaccagctgaaaagaggacttatgatctggtgtgaccagaggtggcaagagtgatcagaactaacatgttcttcacttttttctctgtattgtggcttattctttcaaacctcttgttttagttatttattgctgcatgtggtaggctgaatgatacccatccctccccaaagatacccacatcctactccttggaacctgtaaatgttaccatatttggaaaaggggccctgcagatgtgattgaattagagaccttgatgagggcatcatcccagattatctgaggtgggtcctatatgacatcagatcatgtctgagagacgcagtgggagattggaccaattgaagaggaggtggtgatgtgaccacagaggcagggattggagtggtagctccaagctaaggaattccagcagccactggaagctggaagagacaaggacaggattttccccaagaatgttgggagggaatacagtctgtcaataccttgattttagctcagtaaaactgatttcagacttctggcttctaaaactatgagagaataaatttatgttgttttaagcctgtaagtttgtggtaattagttatagcagccacatccaatttatatacggcataaccaccaaaaaacttaaagcagtgtcaaagagttacgttagcaaaatggtagagtttgcagctccaactttgtttccccacagaaacatcaaaaaacaaacagaaaccattagaacaaacatgatcagaactctggaaaataggcaaaagtttaagcaaccaagcaaacactgaataaagaaaaaggccacttgaaaatggtgggaaactttgtagcatttttatttgctcttgtcccagccttctctctagcaagacagttctcttgatgatgacagccttcattcccagtgtaggaccctggtccctgattacagagggactagagaagaccttacttattgtggatgtctgttctaacctgtctgggggctacgttaagtactgacataggcatgtatctctgcttagcctaacttagaacataggctggaaaaatggcaggcattgcttgcaaatgctcaaagtgagctaacaaactgcaaaaacctggggcaaaagattactggttgaggtgtacaatagaccatctaaagtccaggtgcaaaagctggaagagattctgtgggaaattaggacattcaaaagcaccatgtatacaggaaaatgtagaaatccatgcatatacttggggcaagatgcatgctcagaaaagaggagagaagaccctaagctttcatttcaggctgatccttgagttaagtgtaaggttgggtaagtattgtaggagttccccagcacagagccaatctgcaaagactgggaaaggaagtttggaaaagtatctacaaatggactattatagccatcaaaaataaaaaacagcaaaccctggggaagggtgagagtccgatagccagagtttacattataatatttaagtgcccaatgttcaacaaaatatcacaaggcatacaaaggaaacgagaacacatggcccattcaaagaggcaaaataagtggacagaaactatccctgagaaagcccagccatcaaatttattagacaaatactttaaaatgattgtcttaatgatgtccgaagaactaaaagaaaacatggacaaagaactaatggaaaccagaaaaacagtgtatgaacaaaatgagaaataaagtgatagaaattataaaaattgatcaaacagaaattctgaagctggaaactgaaagctgaaatgaagaatttactagagggttagacagaagatttgagcaggcagaagaaagaatcagtggacttgaagatactacaatggaaattattgagtttaaagagcagaacgcaaaagtaacgaagagaagtaaagagaactgaagggacctctaggacatcatgaagcagatatatatatatatatataggagatatatatatatatatatataggagatatatacatatatataggagatatatatataggagatatatatataggagatatatatataggagatatatatatataggagatatatatataggagagatatatataggagatatatatatatataggagatatatatatatctgctttcactgttgttattcaacattgcactgcaagttatagtcagagcaaaatagataaaaggcatcataatggaagggaacaagtaaaattatctctatttgcgattgacattatcctatatgtagaaaatcttaaagaatccacaagaaagctgctagagctaatgaacaaattctataaagttttaggtgtgaaagtcagtcatgtttttatctacctggaatgagcaatcccaaatggaaaataagaaataattctatttataatagcatttaaaataataaaatacttggaaataaatataaccaaagaagtgaaagacttttacattaaaacatgtaaaatagattttaccttgaaacatgtaaatagagtttacactgaaaaatggaaaatagcccagaaatacacccatatatctgtgtccagttgatttttgacaaggggtgccatgtccattcaatgggagaaaatagttctttcaactgatggtgctggggcaactggattttcacatccaaagaataaagttggactcttgtctcacaccttaaacaaagtttaactccaaactgtgcaatgattatggataaaagtttggtggttcttcaaaaagagaaacatagaatcaccatatgattcagcaattctactcacagatatgtatgaaacagagacagagagaaagagacagagagatggagatgggggagagagacagaaagagagaagagagagaaacagagagagaggagagagagagaaagagatagagaaagagacaaggagagacaggcagagaagagagacagaaagagagagatagggattgagagagagagaaagatatagggagagagagagagagagagacagaaggagatggaggagtctctttcacacatatgcacatacacagtatgctggaggaagctctatcatcttttatgaatctatcttaagaaattatgttgttacttccaccacatggattcatttgaaacaagtcatcaaagttgtcccatcttcaaggggagaagaattagaccatttttttgatggaagaatgtcaaagaacttgtgggcatattttaaaatgatcacaccactttattccatgtggcaattgaagacttttgaattaacaacacacgactagagaagaaaaagagacttcccctcttggatccagtatgaaaaccttcaggaaaggattgggttaggtgctgactccttggaccaatgaccataaccaaagggatgaggtactgtaattagccaagcctggctacctgtctgtctctgtgatgaggtgggtacatctgttaggagaagatgggggaactggtgcagtgcagataaaaatagtagctagtatgcttattgcctagtgaaacatgcacacacgaagcaattaggaatgattgagagcagcatatgaatttaaaaatgagggatgttaaaaatgcataaagaagattaaaatgaaaacactccttacagagttcattcatttggtcaatacagtcatttccatcccaaaacctggtcttacatgttagcttgaaggtgcctcttgcaacagattttccagagacttttgtctgatctttactgggaccaaagtaacctttgattgtctctgactgtggctgtttttccgggagctttatgtgctgggctcaggaaaagttcaacccatcaataggttatcacatatatatactctgggactgattggaccacattttctcactgaattgactgattgatgaattcagttggcagaattaactcttctatgtctacatgaagtgccatttagaaataatcaactcttaatcagcctgggatagtcagtactaaaagcaccttcatgagctgtgaaaaatttaatgcatttatttacatatttagttttaaattttagtatattgttagttgaggtatagtttccaaacaaagagccgtgaaatgtttagtaactgtctctgtacctctggatgaggacagctcagccgggaatggagggggactgggtgaggagaccagaatgtcagtgtggccacgcagcacacttttgttttgtcttctgtccttgagcactggcttgttcctggataaactaggcataataatacctatcctgctgtgtgggtggaaggttaaatgtgataatgatgtgtgtgagatgcctgcacagtgcctggaggtattgaagaattatttgctgccttttctttttctacctaccacttacccgctacccccgggtgctacatgttagaaaacactgtgtaaagtgtggatgcttctgaaaaatctccctgccagcagttagtgccaatagcgtgcagaaaataagatgcaatgatttggcttcttttctgtttggcaataagaagcttatttgcacatagcctgatttctttcaatctgcaaaaaaaaaaaaaaaaaaaaaaaattggaaatgaagtaaagcaatatatattaaaacatgcaaattataaagaagcatttaaagcttgactactcttcacattgtcgtatggcaaactattttttttatctgcagtctaaatttcatgacctagaatctctcgttttctgcctgatgctttgttgcatgacattggatgacattgagaaaatgaaattgaaaccctgcttgggctttgaaagaactggcaatcctgcttttaagagtggaaggaaaaaaaatggaaagggaaggaggaaaatgggacatacatggaatactaaagacaagactgaagaaagagaggttgaaagctctctctcttctgattatgtttctgtgggtctctactgttttgtggccttcaccctcatgggcagagaaggctaaggtgtaattctcaggtaaccatttaatctttccatttaaaatggtcatttacaaacatggagtccatttcctttgcataatggcaacgagatggcgcctgtgctccttcgtggaattccttgctctgggtgatggactggacagctaatttgtttttataaagtgtctgggcacttaattaaatcttgcatcctgtctaataaaaaatcaatatcaaatccactaccaacacgttctggatggcagagaggcatgccagaagaaaatcttgagtggcggttccttccagatttagcaagctctgcagtttgtgtttggctgttctctcatcctgttgcttggcccagctcctattcctaagtcaatgagggcttcaaagcatggtgtgaatgcatcagctgctctagaggtcctgtctttgggagatgaattgtggcccattaaaaaaaagttctctagggaaatgtgaataagtttcctgcaagtctcggaaataaaaacctttatggtatataaatatttgaaggttaacaaggtcttcagttggaggaaggcaggcccttggcagaaccaaagggcatctcacgagtgggtagaaagttataggagggattggtcttttctgctttggtgttggtagtggtagctgggggtctctaggctgattgtgtatgatctggagtctggagccttgctacagtttgaactggtcagaaaagccaaggcccgcctccctctgctgactctgtctcactgagccataggcgtggggtcctgcattggccatttcagttttgcttgttgatgaggaaaggtagatcaagtgggtcaaggtggcaagggtcatgtattcagagtagggactgagtggagttggaaaataagcagcagtgaagaagagagatcactccagcaatcttctcactgccaaaagtctccaggtcccatagactgagcaccattcaataattctatgtgttgtatgaacgcatcagacaattccacaacctccttacttcatttgcctgcttgtcatagtgcgagaattgctttcattgtccatttgtttcttgacagtcaaatctcttcattaataaaaaaaagacttgaattcatggcaccattttattttccaatactattgtatagaatgtccaaactaagatctaaagactatctttttcccaccatccctctagaagttcctgatctttgttatatctcagcccagctcctcttgccatatcccctattacaatgaatggcaagtcaagcagaaaaaagcctgtgggtcattgtggactttcagctctcccgggacatgagccactacaccttttcgattttatctcttaagtatctcttccttctgtcctttgatctcgtaagtgttgtctggacacacgcactcgcctcttaatgggtccttggtttctattttcatccccctccaaagcatccttcgatcatccttcaatccctttccaatcatccttcatgttgtaaccagtcttctttctaaaactcatttacaattgcttttctacttcatctctctgcgtgactaatgtcactatcaggacaaatgttaaatatggcctgccataaccagcttcttgccctggcccttgcttagctttctaacttcatttcttgccattccttccccacttcaagcaactttctctctctttttttttttttttttgagttgcagttttgctcttgttgcccaggctggagtgcaatggtgcaatcttggctcaccacaaactccgtctcccgggttcaagcgattatcctgcctcagcctcccgagtagctgggattacaggcatgtgccaccacacctggcaaattttctatttttagtagagacggggtttctccatgttggccaggctggtctcgaactcctgacctcaggtcatctgcccgcctcggcctcccaaagggctgagattacaggcatgagccaccgcacctggctgcaactttctctttagtcccttggtagttcccgaaggcatactgccttgtccactgtttagtacctctgcctgcacttaccacctccttctcctactaggtcatccagacttggtttctggttggtcatggtgtggctcatgccacaatcctagctttttagaaggctgaggtggaaggacttgaggccaggagttgtagaccagcctgggcaaatagcaggaccccatgtctataaaatttagccagacatggttctgtgcatcaatagactcagctacatgggaggctgaggctggaggattgtttaagcccaggaggtcgaggctgcagtgagctatgatcacaccactgcactccagcctgggtgacagagcaagaccctgtctccaaaaaaacaaaaaagacttggtttcagtgccccttcttttgagtgcttggtatattctctatcctcatacatattgtgttttagcatagctattggctgtcctcttggctaaactgttagcctcctagggaaagaaagagaccctattcatttttactctttatccccagaacttagcatagtgcttggtcaaagtagcctctcaagaagtggttgttggatgaacaagtgaattcatcttattatcacttatcatcttattatcattgttacattattaatagctgataattctactaacaatagaattataaagcattagcgcttttcaggtcaaccttgttaaaaacctgactgcaaagttcaattctgccatttgctagctgtataagcttggacaaattattctttctaagctttattttttctatctataaaatgggataatagggttgtttggagaattaaatgagatggtgcatgctaaatatttgggttatgtatcattcagaatgaatgtttgttaaattatactcactggtaaaatatttaggtattttagatctgctagagataggctttttaatctctttgtgtttttttgttcaaatgtatttgcgaactgattattttcttagataatcattttcttagataaccttagcgcacctaatttgatgcctgttgagagtagagagaaaccaaaaagctcacagcagaaggactttttcatatgtcacagtagacaaacaaagttattttccgtcacagccatgtattgggtggaatgacctttagtagctgatgacagcgatgtagcagaagggacagttttccacttgacctttatacaatgtgccagcttgtctcataacacaaaataagttgcaattgacaggcttgatagaacactaacccgacaggagacagacactgaagcagcccctgtttgctaccgagcgtggcaacttccatatacccaagggtgccttagggatgactactccctaagtcatggccagaacatttagtgtaattagttcctctaggagtttattgtgaggtgagatttgctcataatgaattttcattgccaaggacttggttactcgcaggtaccccactatagtcttttgacttttctgtctttgtaagctgtcttcctctcctctttgctctttgcttttaccataggatgttttcttctttactctttttaattttttttctttaagacagggtctcgctttgttgtccagctggggtgcagtggcatgatcatagctcactgctgcctcaaattcctgggcttaggcgatcctcctgcctcagcctctcaagaagctgggattacaggtgcatgccaccacacttggctaattttaaaaattttttataaagacggggtctcactatgttgcacaggctggtcttgaatgcctggcctcaagcgatcctcccacttcggcctctcaaagtgctgggattacaggtgtgagctgctgcactcggcctcttctcagcttttctaatgcttcatttttgccgttccctaacttgactacttttagttttctaccactgggtgatttttttcccttggggctttctgcatgagggctaaaatgtgaagttcttaagtttgttccttctcccagatagtcacagggcagaagtggttctgagcagcaggtaggaaacgtgttgtcgtttcgtttacaggtttgttggaggaagttgctaccagtcatctcactttgcatacctagttctgacattgactgcattaataaccacaggtaatttactttacctctgcaggaagtcactggaagggttacattttcatttggggtgaacagcaactgtggatacggatcatgaaaattgacaatggaaaatgggcatgccattctggaacttttcccagcttttttccagagccaggtctgtcctgatgtgagaaatgatgtcctcatctgccaaatgagtacaataacattagctctacctaccttgctgggctgatgaaagaaacagaggaaataatacatataaaaactgtgctgattgaaaggagctatgtcaacatattaattcaggctgtccctggttggagtattgtggataatgttatctgctttttattcttttccacactacagatgagaaaaaaaaagaaaaaaagtttttaggagagaaaaaattagaagaaaatgtttaaaaatactctctggaaagttagaattctaataaaatccttagtaccacagttgaggatttggcttcatgctccaagtaagtaaatctggctgagattaatatttgatgcatatttatgaaatcagatatatcaaaactgtatcaaaagatataaatcttttatttttcttaaagaccttatacaatgaaatgttcatttatatcatatggacttggggcagcaacaaaaacttggcaacctggggttgctgatatttacagctgttcaacattttttggatccatgtattctcttcagaacaccagaaggctgtgcttttcaaattgtgttctgaggagcctcagagatgccttagggaaggctgaaagggaagcttcatccagagtactttggtttccatctgttattagtccagtaagatttcatctcaaaaagggctctgttgctaaaaaaaagaaaaagaaaaacaaacaatgaaaaaaaatcaagaagtaaacaaaaattcttgaaaagcactgccttggctgggcacggtggctcacgcctggaatcccagcactttgggaggtcgaggcgggcagatcatgaggtcaggagattgagaccatcctggctaacatggtgaaactccatctctactaaaaatacaaaaaattagccgggtgtggtggcgggcacctgtaatcccggctactcgggaggctgaggcaggagaatggcatgaacctgggaggcggagcttgcagtgagccaagatcgcgccactgcactccagcctggcgacatagcaagactccatctcaaaaaaaaaaaaaaaaaaagcactgccttaaggactttcaaaaatggtatctcagatatttggaaactattgttgagagaaaggaagagattcctcccaaatctgggcttctttttcatgtttgatagaagcttgaattttgagtaaaaaacacagtatgctagagatgcttaacctggaatgaccatggtatttgatacaaatgaggttctgtagaatgcggacagctctgcctggactgctctatgaaatagatctttctacttatccacactcgaacaagtgtgtccagcataaacatcacagtgcttcaaatactgttagtcccagtcaaggatgttattctgtgtccattccactcagaggtattcattttcttcttggcagctggaaccaattgctttggatccaccatggaagcctcgacatcctgaaccaaactcctattaatgaaacttcccaaatttaaacaaagcaagacaaatagatatccacacagcgtagatcatgacttctttagacatcatgaaaagaaaaagaggacccacgtggaagaatacgctcatttatgatcagggtagcatcatattcctctcccttttaacattatttcaggatagcagctgtctggatgctggccatgggcttgaaaaaaaccaggtgggcatttctgcccactgtaccgtttctcccatgcgtttcccagtcccctgtcatggcatgaaaaaaccgctattgttctgtgttgggacaattagatttttgtaggggggagaaaccacccaaaagcaaatggaaaaatatgctatgattaatgtcagttacgggaattaaacttcggaggcctttaggacaattatgaaggaatcattttccccttggtggcaatatgtactacagttgtcccttgatatccatgggggattaattccaggacgcctgtggatacagaaatccacgtgtactcaagtcttgttttcagtggatatgaaaagtcggccctccatatctgcaggttttacacttggcgaatgctgtatttttgattcatgttggattaaggatctggaacccctgatacagactgtatttattgaaaaaaaagtctgcctatgagtagactcacatgttaaaacccgtgttgttcaagggtcaaccataactgcaggcagaacatctgggcaggaagctcctgcaggaagacctgtaaactcaggtctgtggaacggcgatgatcttcttcccttgcttccagaattattgctgtgagatcaggtgcactggctacgaccttactctttgtgcagaacttatttctggtctggtttaagtgaacgttattctttctgtgcagtcctgtggttacatcaaaggttaaatttcatatagcatgtctgttatatcagacttctctgatggcctgtccagagcaaacattttaaaatattggtcctattctgtcttataacagtctgctctggtgatttttgtctcatcaattggattatgacactgtcagccactgttagtgttattctcaaattcagtcttccattcatctctccttcccttccctggcagacagacttctgcagccactgggactgttggggtgaggaaaggcaagaaccgatgtttcattctctccctcccttcttcctccctcttttttgttggttgtggggtgggctacatcttcttacccaaacaaccaggagcatttgttggcaagtttattgtgcccagtgccgatgtctggacaattaattccctaggtcagtggctttcacagtttgtgatggtgactccaggaaggaaactcaccatgaccctgtatatacatagaacaaaaatgcagcccactctgatattgtatttgttctattctagttcattaaaagtgaatgttggtcttcatcctttaaatggatattgtcacctgctaatagattggaccagtattttgaacaatggccttggtacttcatttggctttgcatgctcaattgtcatatcctctgtgtggggaagggggcagggctgcttccctgggctgtctcctgggatgcccaggggccctgcctgcctgcgtgggtccttggggacctagaagttccggtttttcatgaaacagcggggctctagaagagccttttcccttatcctgactcttccaccctgatttcttcccgaggacttcttactatgtttaaagatggcagtgaagtggcctgtgggttctagaaccctgcaaacaccgccccaagtgtgataccagtttacccttcttgtagacatccccaaacttcaaggtgattgtcttgaagcccttcacccaggagagggaaccagcgtacaataaccgctgtgctgcaggagaggggaggtaaagagttgtcacagccttgagcctagctcttcccccaaaggcagtctctcttttcttcttccttcctttagtcatctgtgtatagacacagatgcaaacttttcctggaattcctaatcttaagcagtcttcaataggagacctggcttcagagtctgtccttaaacagtgaggtgccctgtgtcttttattcttaactgtggcctatctccactcaaattttggcatttggcgtttggttgtcagtggttattttacattctcaagtgtcactgtcatttggttagggtagttgtcagggtggttctgagagccaagtgtgtagcatagctttgttgttacaaatgaaaaggccagttcccatttaaccaggtactgctggctttctctacaggatttggtctacatccattagtgctctttgttgtccatgtcactataggagagattccccgggacctacagggtcactgtctgtttccaggatcagtgagtcactccctcgtggcctgttatggctttgtgtgaccacagagagggtcacggtggtgtggaagcagggagggggagtcagccctcgctgtgcagcaaccacagtgacgtccccagtgatcaggcttcgtggggatgctcaagtccctcttgatgatcagctctagtgattctcatgttctgcacgcacagaatacatcctggaataatggtggtgaggtaggaaactggcaagacttattttgtgttcacaagcctcctgacccaaacaggatctggtccagacagggtcaagtgaagaaactgacgcaaaccagcagatggcgacaaaagccatccctaactgcccttattgctcattagcataagacatcccaccagccccatgacagcttacaaatgccatggcaactaccggaagttactgcccctttcctaggaagttctaaataacccacccctcaatttgcactagctcaccccttaatttgcctgtaattgaaagtgggaataaacacagttccgagagcccatatgttgctgactctgcattgctgcctatgagttagccctgctctgcgaggagcagtacgcttcattaagatgattgctgtctaacaccaccaggtcgcccttgaattatttcctggttgaagtcaagaaccttcctgggataagccccagtttgggggcttgcctgtcctgcattgttggtattttccgtttgctgagaaaagttcagttagtgctgcctgagctggctgaaggcccttctgggctgggtccatatgcccaagagggtgacactggctggtctcgggggtggtgtctttgagggaatgagattggtcctacgagtgctggagaaactgcacactgaaatggtgtagcctagcattgttagggagtggcagataggagcaagaagctgaaagcagggagcagacaggaaggagcacatcccctttcctcctccagccttgcagtctctttggagctggcagcaaagtcagaaacatggttggtctacagaggtccagcctcagcatcacaaaacagaagataaaaagatatgtttagaggggagagacaatagcttaataacaggcacagccccaaaataacattttgcttttccatgttatgaaccaagtgagagataacatgaaggcatgaagaagatggaaatctaaatatcagcatcgttcctgataacataacattatggaatgtggcttgggtatatggcaacagtgggcttcctaataccaaaccccagaacaagaattgcccatgcagctgtgggcagtgatgagctgcaggcaccttttttttgaggcctggccttgtaaacctgagtttctggaggagcagagcaaatgagtgctgcccaaggtcacctggcctccaccaaggagggagagaggaagcactgagttacacatgctcagtcttaggtcccagtttaccagtggggaaattcagtctatctccctggacaggtgaaagcagcggggcaacagggaaagcccctcctcatggatacctaagggcagggaagacgggctgtattccctccctacataatgtaaaagacaatattctcaaaagcagttgacacaacaggggccagttcttataaattgatagtatcaccccagaatgtgtttgggcaaaggcagttttataagtggccacatgatctggttccatgacatgctgcttaactgctctgtcttaattcaggaagtggttttagaatatcaggaaaagagagacggatggactgcatcatctttctagaaatatcatatccataatcacatccatgatctctctcttagcctatgatggacaaataagggtctgcagtgagattttacccttccctgcaagaatctggggtgtaactattcaggattattcattaagagagggctctcaagctaatagaatcaaccttggattaaggctggcatagtaatgcagtcagtacttggtaattagcaatattctgattcttttcttaaaacaccagctcatccctgcctgctcctgcttgtcttcaggtgtctgcaagatgataaaatggatgaacatagcacatgattatccgtggaatactcagaaactatcatctctcgtgttatagcttgctttttctctatttttcatggacacctgtgcttctcactctaattttacattgcacacctataatggattcttattttctgctactgatatttttgctagtgtataagatagaatttcatatatcaacatgtcccagtattcctcagagggcttaatgacttccaggtggttcagaaccactgatgcctggggccctaaagggagactgctgcatgtcctacatgtgtgaatggaggacagagagcgagtttaggacagggggcagggatggacattttacattttgaagaagtaaacactgggcaagactggccattaattcctcctctatttgaccatcctctgggtgttgggactcactgaatataggctgagtttcagagagacgccccttgagtagaattaaatctgaatcaagaagcaattaaacccatgacagcaatctcttggaatcatttttacttttgtaacaactcttctacttgtgtttttcaaaactcttcacaggcattcttttctcaccattttacaataatctggtggcatgagttggcctagtgttatttttcatatgtgagatgagtaaagtggctcttagaggggttaaatagggcctggtgtggtggtgggtcatgccttgcaatctcagtgctttgggaggctgaggtcggaggatcgcttgagcccaggagttcggggctgcagtgagctatgattgtaccaccgcactccagcctggtgacagagtgagactctgtctaaaaaaaaaaggaggggtaggggggtggtaagaaaaaaccctaaaattatattataagattgtttaggatgaatccaggactaaaatctgggtctcctgactcttaagcagataaatcagttttaaaacttgatttttttttcgtatgctagaggatttcatacaaagatggaggaatcacgctgcatccctttggtgtttacttgatcattttattcctctttagaggtttatctttaggatcacatgttgtgccatctatgatgttaatctttaagatgctagcttaaagcattataaagccaagatttgttttttaaagtgtctaaagagaatgtctcttgttaaagtgagactgtcttctcattttacaaatcctaactgccttttacagcacacagtgcggtagatgttcgggaggcagccgccaacaaggcacaatcgcccactgtcttcaggggcctctggcttagtcctcatgctcctggatagcacctaccaggagttcccatctgggtccaggagttaggctttaatacctagtaagagtcattgagctgccaactattattttgtagctcagaggtcttggagctctatccttggagttatacacttaaccagtgaagagcctaacggccaaagatgtaactgcttgacatatgaaaccacatggtgaacttagtttgttctaccaaggacctgaggtctttcttccatctgcattctgttactattgcatttttgctctggaaaatgttcccatttaacgaaattttacttctaaaatctgcatggcatctgaggagtttgagaaagtacttctaaaatgtgtcctgcagagccttctacagtgtatctttcggcttctccttagtatttatagaggcatatatatatatttttattatgctttaagttttagggtacatgtgcacaacgtgcaggtttgttacatatgtatacgtgtgccatgttggtgtgctgcacccattaactcgtcatttaacattaggtatatctcctcatgctatccctccccctcccccaaccccaaaacaggcctggtgtgtgatgttccccttcctgtgtctatgagttctcattgttcaattcccacctacgagtgagaacatgtggtgtttggttttttgtccttgagatagtttgctgagaatgatggtttctagcttcatccatgtccctacaaaggacacaaactcaaccttttttatggctgcgtagtattccatggtgtatatgtgcctcattttcttaatccagtctatcattgttggacatttgggttggttccaagtctttgctattgtgaatagtgccgcaataaacatacgtgtgcatatgtctttatagcagcatgttttataatcctttgggtatatacccagtaatgggatggctgggtcaaatggtatttctacttctagatccctgaggaatcgtatagaggcatattggagtccagtacatacacaggttcacagtgtgctagaagcattgctctttattagttattcttatcactggctgcagttttgtgatttctctctattaacattgcctttgaattgaaggtcactgttttatttgtattgctgctcttcagccaaaagaaaatagcttcattctgctttgttccaagaaactaatattctagcacgctttatgccttctgattggatttcatccaaattggaatagctcaggctagtggaaatattttatttaatcctctagggtttttttttttttttgactagctgttgtatcttgatacctttacatcactcaaagaatttaagctgttcctgctgccatgtcattagccagagaccaattttgtacaacccccttggctttgggcctaacactggtatgttccatttgtccattccagaaagggatgtacacatcactgtggtttgaattatattttaaaaaataatgatgatggtggttgctcagtggtgctcctctgatactctgaattctattatagatgaatgagctgcaaaatattctataaaaaaacaattatgtcttaaaagattataggctgcagcaattaccactaaaagggtgagagagcctgtagtttttgagcactgacaagcagatacatccagctaattttttgtgaaaacaccagcagagcaaattactcatgaaaaatctgttcacaggaatgaattaaatgccatgtccagtttaacagtgaacactgactgcaaccaaaaaccaatagagataaataatgaatggcatttgaattcattcatttgtatgattccaaaaatagcctcagtgccaatagtgtttctaatgtccaaaacccactgtagacatggagaaggataaagaagccaatgaaaaagaaactaaaaaagtgaccatttggattttattttttctccacattcctgcagccagtcacattgaccttttatttttattttttatttttaaactttagattcaggggatacatgttgtgcaggtttgtgacaaggatgtgttgtgtgatgctgaggtttgggcttctattgatcctgtcaccccaaatgtagttagtgaacatagcacccaataaaatgtttttcaatagtgcagtttctacagttactgttaatatggaattggcccaataacaactggctgaatgtataagttggatgatagcttgccagaaatttcccatggccttgttggtaggctggggtaagatatgataatatgctataaagaattattcttttaatttctctcctagttagactatacctaataaacttcagttttcagtgcacagaattggtcatttatcagctgtgcacctagattgctaagtgagttagtcctagcctaagtaattaacccattttggtgatgactgaatatatgtctaaattcaattaaaatgaagaatatggtgtaaaattatttttatgcaggagagcctgccattacattttaaataagagtttctctttcagagtttacatatttttaaatggctaaaaaaaaaaaatcacagttttttgtgtaggcatgatctatcacatttccctgtataaccccaaatgggaaaatggaagttctaggttccaagcttgggttcctgaatttcactttaatattttaaggattaagaaagaaccttgaaaggatattctgttgtagcccagtttttaggcagtattgattcaggaaaggcaagccccaaactggggcttagcccaggagggttcttggctttgcccaggaaagaattcaagggaaagatggtggtagaagaaaacagctttattgaagtggcagtgttatagttctgtgattgctcctgcagcttaaaggcagttctgcagtaatatttatacctacttttaattacatgcaaattaagaggtagttcatgcaaaaatttctaggaagagggtggtaacttctgcattgttggatcattgccatggaaaggggcagaaactctcaggtgttgccatggcaatggtaaacatggcatgctgggcctgtctttgaaaaggtgcttccattgcctccctgttttaaccagtcctcaattaggcctggtgtctgagccccacctcctacctctgtatcactcttaatactttgttatatttttattaatatatcaaggttatgttaattttgtgcactgaaagagctgtgaattttgcaaaagtttccaaattaactgagaagtgccaccaagagatatagtctattcagtttttccaaaagctgctttcttagcacatattccatttgggcataattttagcaagttgacttataaagcgtctttaagtggaatatttcttcccctgcctcacagccaaggcaatggctctccctggcactgtgcaaaccctgagccagacgctctgctctcaacagttacaacaaagtcaccaggtagatctagtttcactgtctctttcactgtcaaggagactgagtcttagagaggttctgacttgttcaacatcttgcaactagtaaagagtaaaattaaggtttgacttgagacagcttcttcagaactcatgctcttaaatcctgaccctatagtgtgaataccttggacccctgctcagccataaagtcctctcttgccctccactgtcatgaggactctccaaggttgtattgacttgaaggctacatgagaaaggtgggtgggtgcatactttacagttgagtttgatagcatagcaaggcttgacagataatgataactagctatctatgtgcctagggtttctcatacatcgcatcatgaatttttttacaaccttgtgtccagtgtattgatcagaaaggtcacagagacaagaagtgccccagcaggaattcagacccatctctgtttggcttcataatttatgcaaatcgatcccagacagaattctacttagaaatgcctcaagataccagttggaaattatctttcatttctgaaactggaaattaaaaaattatttaaacaatgcataatcattgtaaaaatatgtaggcattgggatatacagtataaataaaagaaaaatatcctttgtagagatcctttgtagacatagccaccattcatatttcgatgtgtgtcctttttgacctttttcattgtgtggctgagtggcattttgtcttttgctatttccgttgggttctctgtattatggctacttggatatgatctaaggaatgtttctctttctccagtaagtgctttcaatgcatatatcttaataaacaggtagaaagttggatagtttgctctttctactaataagtaggagccacgatagtagtattgtgacagtggtgatagtggttggagtgctagcggaggtgatagtagcagtggtcgtggtgctgatgatagtacgtgtgagagatgagttggtggtgtaggtagtgggaacagtggcagtggtggtagtggtgatggtagaagcagtggtagtggtgataggagtggtggtggtgatgataggagtggtggtggttgtagcagtgttgttggtaatggtggtagtgttaggagtggtggtagttgttgtggtaggagtggtagtggtggtaatggtagaagcagtgggtagagttggtgatggtggtagtggtaggagtggtggtgatagtggtggtaggagtgatggtggtgatggtaggagtggtggtgatgtttacttggcaaattcttgctcaggaagagtgtaggagtgttgttggtgatggtaggtaggagtggtggtgatggtagaggtggtggtaatggtaggagtgttggtggtgatggcaagagtggtggtgatggtaggagtggtggtgatggtgggaatggtggtgattgcagtaggagtggtggtagtggtagtgagtggtggtggtgatggtaggagtactggtgactgtagaagtggtggtggttgtaggaatggtggtgatggtggtgattgtagaagtggtggtgatggtaggagtggtagtggctgtggcagtgctggtgatggtgagagtgatggtggtagttgtagtggtgatgatggtaggagtggtagtggctgtggcagtgctggtgatggtgggagtgatggtggtagttgtggtgatgatggtaggagtggtggtggttgtggcagtgctggtgatggtgggagtgatggtggtagtggtagtggtgggagaagtcgtagtggtggtgatggtaggaatggtagtggtggtggtggtgattgtgggagtggtggtggtgccatgagtagtggtggtagtggtggtggtggtgattgtgggagtggtggtggtgccatgagtagtggtggtggtggtacgagttatggtgatgatggtagtgatggtaggggtggtggtgacagttgtgatggttggggggtggtgatggtagaagtggtggtgttggtggtaggagtattggtggtggtgatggctgaagtggtggtgggggtagtaggagtggtgatgatgatgatgacctgactggtggtggtggtggccgtattggtggtgttggtgatggtgggaatgtttgtgagcactttccattgcacttaaaaagaagtggacaaactcatttctcttgcctggacagttgtgagtgaagatgcctccatccctgagtctgaaccataagcttggaccacatatataagtgattcacttttccatagcatctgtgaagacatacttatagaaacaatgtatagttctgaaaatctgagggtttaatgaaaagtagcaaaaattcagttggtcatttacttccctggcacatttgatgattgacatttggtgaaagaacactttattgtgaatctgtttgaagtggtggggcaatgagtattttggaggtgcccataatcaagctctttcttcagaagcttgtgatcctgagaaattttgtgttttctgtgttgtctataaactgcaacttaaggatgtttgcaaggcctattggcatcacgtgctctctctctctctctctcacgcacacacacacacgcatgcgcacacacacacaagcttgctagagcttgccagtcatatgacacactcaagacctggtgtaagtactttttctattttagtcattcacaacttaactggtttacttggcaaattcttgctggggaagaacacttgcttcagaaccacatatcccactgaaatgtgtcagcaaagcaacaaatatgtatcaagaacaaggcaataggctaagtgctgagtgggcagatatcacagttaaattattgcttgtcttccaaaatttttgtatcatctccaaaggtttgtttttcctttcatatcacaacaaaatgatttcccagtcttctttccacacattgggcaagcttaaaatacaacatttctaaaaatcctctttggtgttccctgaaaagatctatgagctatggaaaccaagcttaccctaagctgtttagcattaagaatttgaggaaaccaaatctccacttttatgcagaaatcaaagagtagcataagtaacttgtaggttattttaataatacaataattttgtaaacaataaacagctcaaattttgtagctggctttgtaagtagagaaattgaaataaagtcactcaaaatcacactgactgattgattgtcaaaactcttagttcttcccaggactttttaaaaaacatacttttaataaaaagtacagataatatttacatattttgtatcctgatttatcttgtaatattaaaatatttcctgttttcctaattgttcattgacttactgcataccattctatgagtggatataccataatttacttaaccattcccctagaattggatctgaggctgtttccattttggagagttttttttgtttgtttctgttggctactgaatacttcctatgggaaagaggtggacgtggtggaaaatgaattgatagaatagtttgcatttgtataaagcatgcaaatttgtatttccagatatgtcacagtgaaaggatagaatctttcctgtagaaagaacacagaggttaagaatataggttttggagtcagacagaccttggctttatttctgaatccacataactgtgtgactaattttgaaaattttctcgaactttctataagcttctttctttcatttccaaagtgggagtaaccactctctcgtgggatcattgtgaggataaaatgattgatatgtagcaatgtgcttggcacatagcagtgctcataaaattgttgctattttctatgtttatcttattcctcatccaaactgtaacactcattcatttattttagtttgatttttttgagtcggggtctggctctgttgcccaggctggagtgcagtgatgtgatatcggctcactgcaacctctgcctcctgggctcaagccatcctcctacctcagcctcctgagtagctgagactacaggcgtgtgtcactgcacttggctacttatttgtattttttgtagaaatggggttttgctatgttgcccagtctgatcttgaatttctgagctcaagtgatgctcctgccttggcctctcaaagtgctaggattatagacatgagcctctgtgcccagccccattcatttatttattcagcattcaccagtggctgttgcatgcctgacactgagctttttactggcaagacagagctgaatgaggctgtgtttctgccttgtggatcccccagtatccagggacccagatcaaacagataggcaagacccctgtgtcacggaggaaactacaggggaaggtactgctttgggagtggctcttgggaaaagtaatagcaaaagcccagaggttagcaccgaaaaagatcaagttcagactctgcctttgctattttcttgctgtgaggccttgggtaaattacttaaagtttctgaatttcactttctgcatttgtattcttactctgcaaagtgttgtgaaagaatatacatatagctctgggcatgtagcagatgctcaaaaatgattattatgcttgaagtcttcagtgccccaatcatggctgattttcatgaaaataaactcaacaaactccagtgttctgaaatgtctgagactggctcagctgtgctcaggttagtctgaaatacattttattacagtctaattctctgcaaagtggtcatccacacatcttgtgtatggtaatgtggaattagaatattcagctctcagtgaatttcatttattggccattatgtaaaaaccaaagaaaaatgacttatgaagacattgattgctttgtagctttaaaagacctccttagaattagaatggctacacagcctctaagaatatggtctacactatatattttgtcatcctgcagacacaacaaggaagtgggaatcgaatctatttagcaggatgtctttatgtgtgaagatttcttgctgcttataaatgcttatttgattatttattcatagatatagaaagcacttttctttcattctgtttcctcattgtcacccaagtaagagtcacttattactgatgtgctaaagaataacagatgagcattgaccttcaattaaacattagcaaatatgttgcagtagcataaaaaataacatccacttgcttcagaatagaatgagatgatgcttaacatttctattgctgaggtcctacaagtaaaacatgtttgtttcataaatagaatttatattatcaattggaacatattcttcaatgcattattttgcctactgcttaggaatatcttcctttgttaattttgagttattttatttctactattcagccatgcttataaaatgcaagtcatatttctaatattattgctgttcttttagtcagatgggttcaaccacatttattcagcacctgctatgtgcagtacacttgtcagcatgctggtcttaaaccttgagctataaactgaaatcacattaacaatgtctagagaaagactgcagagatttaaaataaagaaaagtcagagaaaggtgagttatgttttttttgaccactgggccaaacagtgaaaggagaataggagaggaggttttcttaaaggcacaacaggattcacacaaatgaggagacttagaacagaaaggtcacaaatacagcacttgtagtgctggggatatgtattaatattttaaaaaaacaacatattttgaaataattctgcacttaaaagtcacaagtatgctacaaagagctcacatatctccctcgttctcatgcctgagctggctccttcctgagctggatacatacgcccgttatcagaacgtttttctgaccacttgagggcaagctgcagttttatttttatttttattttttgagtcagggcttgctctgttgccccggctagagtgcagtggcatgacatcggctctctgcaacctctgcctcctgggctcaagccatcctcccacctcagcctcctgagtagctgggactacaggcatgtgccactgcacctggctaattttttgtagagatggggttttgccatgttcccaggctggtcttgaactcttgagctcaagcaatcctcccaccttggcttctccaagtgctgggattacaggtgtgaatcatgatgccctgtcactcctaagtaccccattgtgtatgcccccaaacaaggacactctcccatgcacccaacctgcagcttcctccaagtcatgaagtcagcattaatacaacactcttctccagtctacagactccattccatttcaccaagcatcccagtgatgctcctttctcctttctgactcaggaacacacattgcatgcagttgttgtagctcttaagtttcctcctgcttgagcagttcgttagtactcaatcgttctctgtcttccatgtccttgaaagttttcaggagtgtagaccttacattttgttggatgaccttcagcctgggtctttcggatgtttcctcatgaccgggttcaggtcatgcaaccctaatgagaacctcttgaaaatgatactgtgcgttcacatcaggtgtcacacagtgtggacccctcccgccactgtggatggtaaccttcatcaccccatcattctgtggctgcctggtttctccagcactaagttcccatgtttcctttgatatctaaatagtatgttgtgggcatgatagtctatgattattctgatgcctactccccatcaaacctccatttcatcattcatttccattagtcagcattctattagcatggatgtgttggttcctattctattcaatgggctgtactttattactattattttgattctcaaagtgtctcaggtttggaccagaggaacttcttcaaggtgtctcttgtgttctattgacatgtccccatctgcctttgaatacttcttaatttttttgtacaacaggatgctgtagacacatctgtactgcccctgcctcagccctggcctcagccatttctcccaggagctctggttccttgtatggatggatggagtttagaaatcaggatctgtgtgcttggtgtgctcatggctactgaggtgtcattacttataggccttctcagtaggtaaatatagaaaatgtgtgtaaatgcactcatatgcttccttcgctatttccatattcacctgtgagtttgcatattaaaaactagtagtttatgctaatgtttcctattccagtgcaagtcattagaatcttttctacccttccccctttccatgattatatgaacattctccaataatcaggaatctggccctctttatcttcatatccttaactccttcatttgtttacatatttctccatgtaacctatctcccatttatcccagctgtcttccccatctgttgctgtgttcccctcaatgtgcctcatccccaggccctggcaggctcatcaccacgtgtgctgccagatgcctctgtgtggcagcccctgcatccttggtgctggtgagtggaccacctgtgtgctcctgtacaggctcccaacttaccaatggggccgctcactgccaccttttctgcacaggaagagacgagaaggcccatttatgattttgaccccagtcccaggcactgagttcttcaagggccaggaatgtgacttgttgatctttgtagcccaacagtctagcaatgttgatttacccaaagcattattaattgagtgacagatgaaataataaataaacatggcatttgaaaggtgaaaaagtcttgtcaatcattttcaaacactctcctctcccagaggaaccatttccacatcatctgtatcacatggacaaagattgccaatctgggtaaagcttcctccttcccccattgaggtgtgaaatggactgaatgcttgtgctccctaaattcctgtgttgaaaccctaattctaatgcgatggtattaggaggtggagtgtttgggaggtgattaggtcatgagggtggaggcttcatgaatggaattagtgcccttatacgaagaaaccagagaggtagcttgttccctttctgccatgagaaaaagcagctgcctgaaacgtggcagctctcaccagaacctatgctggcagcttgatcttcgacttccagcctccagaactctgggcaatacatttctgttgtttaatctacccagtctatggtactctgtaatagcatcaccaaccgacatagacaaggaggtctctgatgcacctttttgttgttttgtaacaatcatgatttaaaaacatcttgtggaggtattggtcatatttagcacatgaggctctgggacttaagtggggtaagtgatttgtcaaatagaatatgcacagttagtgtcaaagccgttgcccggatctgggtaccctgatccttagtgttgtgattctgtgttctatccaatgtcatgcctcccccacatgactcaggagcagagtgctggcatggagaagagacagggtggctgagcgagctcacttatggtcctgaataccaggggcagaggtttggactttgttctgcagcgcacatggagtcctccaggcctttgagaagattttgtattacaggttgagtacctcttctatgaaatgcttagaaccagaagtgttttaaatttccaatattttggggggttttagagtatttgcacatatataatgagatatcttcaggataggacccaagcctatacatgaaattcatttatgttttttgtacatcttatacacatagtctgaagttaacgctatgcaaaatttcaaaataattttgcacatgaaacaaaattttggctgcattttgactatgacccgtcacatgaggtcagatgtgcagttttctacttatggcatcatgtcagcactcaaaagctttcagactttggggcatttcaaatttcagatttttggattagagatgctcaacctgtaacatgtatgaaagtgcttggagtaatgccaggttctagcagatgtttttgcattttgtttatcagcttgtgcacatctgagtgttaggaaggtcgctctgttggtgatgtgtggaaaccatggaaggagtgagagagatcagacagagagtaattcatccttgcagaagtgctgacaactcgggctaggctggggacagtagaaatggagaagatgtgaatatgtcaaataccacgagagactcacgaggatgtgaaatgtaggaaggggacaaagcaaaggatctgaagctgaaggcctggatgggatagtgcccttgcaaggcagagtaacatcttgctaggtaggtaggcagtgaacttgatttaagacttgatgagatttatgtcttatattcatttagttgctaatgaaaaggatttaaagtggcttatgaaaaacataaaaaaacaagaaacaaaacaagggaatctaaagttcattgtaatcagactcattttttgaacaatttgctgtgagccaggcagcatcccaggtgcaggtcactatacaatgaccaacactgtgtcatggcgcctcttgtgtggatgcatgaggccttgaacatgtggaggtgagggtgtggtggcttgtcaaggagaacctgcctgtgcttagggagctggtggagcagggagcctacctgcagggttggcaggaccggaggagatactgggatctgatggatgaggtagacttagcctgggctggatgtggaggaagaatgactctggcaatgggaacagcagattctcctgaaccctgctcccagctcctctcacagcaactttgcttttctggttccctatgtccgatctgtcagagaacatctcaaatccgaccacttttcaccacctgcgctttcatttccaggtcctggctacccttaggtcttgcctggggaacatcaatgaccctgtgactggtctctgggctctgctcttttacaatgtgttcccaacagagcagccaggtgatcctgttaaacatgagctagatcatgccagtcctctgctcagaacccttcagtggctctcatctcccttggggtaaacaccaaagtctgctacaatggcctatgtggctctgaagatcaagcccactctcataccctctctccctcatctactactttccccttggttcaccctactaggagtgttccttacatattaaagtgtgtatttgcctcatggcttttgcactctctgggagctccctctgcctggaatatccaattagtgaataggggtgtcattcggggaacccagagagccagcttttgtcagaatggaggtaggatgcacccttatgctaaccagaggtggtgctggcagggcaagtggaagctcccagtagctgagagctgtgagagaggctggagtaggagataatttagaaattggagatcatcactgaagctatgcaattgctggtgaccatcctgatgcccttttctaatcataagataaaaaataactggggctgagcatggtggctcacgcctgcaatcctaacactttgggaggccgaggcaggaagatcacttgaggccaggagtttgtgatcagcctggacaacatgacaaaaccccatctctgaaaaaaaaaatttaaaaagcagagcctggtggcacatacctgtagtccaagttacttaggaggctgaggtgggagtattgcttgagcccaggagtttgacatcagcctgggcaacataacagggctccttagctacaaaaataaaaataaaaaaagctaggtgtggtggcacatgccagtagtcccagctacttgggaggctgaggcaggaggatcgcttgagcccaggagttggaggctgccactgcattccagcataggtgacagagcaacactttgtcttaaaaaagaaaaaaaaagagagaaagtagtagcttttgatgcctacccttttgaaggtgagtggcagcatggaacatagctaatcacagatattttctgcgataacttatatctttctttggaattcactgtgagtgtaatttttggcagccagtttaccatttccagtgtttaattttgttggatcagcctgcgctctctgagaacttttcatctggcagtggatgggtatagtttagaatatggtggatagcagagggaggctagactgggtttttaattttttttggaatttgaagacagtgcttaatgatattactaataatagacaatccttttgaacacatacaaaatgccaggcatgatgctaattgctttgcatagattatctcagttaatcctcagaaggccttatgatgtagatactattattaaccccattttttacagagcaggaaactgaagcttagaaaggttaagtaacttgaaggtcagacagctagaagtggcagaggtggggaagactcaggttttctcctaacccctatggaacagatctggatgcatctttacatacattatgactgtatcaggatgctattttagaacacataattcaagaactttattgcgtttcaccaaagttttgattttgtagaacaagaaataaagtattaagaaagaaatcatataaacatttgaacgcttggtgtcagttaaggaatgggtacatttcagcattatcctagaaggtcttatcaggccagactctactgcgtattttaagtggggtgtctgaattagcttctgcagtaacttctgaagaaggtggcacagactgagagatctgctaattacttgggacttgatcttggacagatgaccttttctagtatccttagaatgaattgttggtaaatgcttagtttccggctataggtttcaatgcatatgacaagtttatgtgaatgtctttcacttaacagcctcagagacacaagttttctgccctttcctctacctttttgggacccaggtgtgtgccttgggaatgggccagtgcaggaaaagagttaggttgagaggcacgctgtgactcatgttactctctgctggtgtatgataaaaggttttgttcaaaatgacaagcttgttgaaaaatgtgttttaatttagacttgagtcttatcgaaatggcctccttagaaaatggcttatagagccataagaacataaaggagtctttgtgatctagggtagagactcttaaaacattttctcattatgacgtaaaaaaggataatgtttgtattgcacactggggttaagtagtaagtgctcatggcccgaggtgatggcttgggatgttgagctgccttgggcccacccactgccccagggtgaagaggatcaaggtcttagtgcactagcctgccaaggaccaccagaagggaagctctgatgaatggtatcttaaaacccagtccttccatttctgcagaaatagttttatgtgaaactttctaattctttgggcattggattttgaagataagttctcattagaatggattccaatttctgcagtttatttaaaattttttaacagtttgataccaacactttattagcaaagaaaatggaatcaacttttttttttggtgccagaaagcatagttttttttccataagaaacaaaggtggaatatatgtaatgggtgagagacaaccaaaacttgccacataagggccagtgagagaatcccaacaaatagcaaaagttcatttttccatgacctattcatcacagaacaattaaaaagctacacaaagatcagtcttacctgcattttagaaatacatttcaattcacccatggatccaacatgggtgatctatctatctattcttttagatagacagagaagtttttattaactaacttaggaaaaaacactacctgttaaactcataaacaattgtttaaagagtatctacagaatccttctctcaatgtttccatgtaaaagaaatgaaaatcaatagtccagagatcctcgttaataatgagccactgataaacacaacatatttataacttgtataacattttatttatgtgcattctttgagcattatgcaatatgtaattaaaatttttttaaataaaaaaatttaatatctttattttttgtcaattgatttttccccacttaaaaaatttgcaaataataattgtgcatatttatggggtacatagcgatgcttcagtacatataatatatagtgatcagatcggggtaattagcatatccttcatctcaaacatttattttcttgtttttttttgagacgtagttttcctctgttgcccaggctggagtgcagtggcaagatctcggctcactgcatccttcatctcctgagttcaagtgattctcctgcctcagcctcccgagtagctgggatcacaggcgcctaccaccatgcctggctaatttttgtatttttagtagagacggggtttcactatgttggtcaagctggtcttgaactcctgacctcaagcaatccacctgcttcggcctcccaaagtgctgggattacaggtatgagccaccgcgctcagcctaaacattcattatctttttgtgttgggaacattcaacatccttctgactatttgaaactctaaaatatactattgtgaactatagtcattctctattgctgtagaacactagaacttattcctcctatctagctgtaattctgtaacttttaacaaatctctccctatccttcacttccccctacccttctcagcctctaatatcctctatcctacctcttacttctatgacatcaaccctgatacagtttggatgtttgtccccttcaaatttcatgttgaaatgtgatccccagtgttggagatgggcctggtgggaggtgtttgggtcatggggtggatccctcgagaatggcttgattctcttcccatggtaatgagtgagttttcactctgttagttcacatgagagctggttaaaagagcctggcatttcttgcttgttccctctcttgccacgtgatgtgcctgctctcccttagccttctgccatgattgtaagctccctgaggccctcactggaagcagatgccggcactaagcttcttgtaaagtctgcagaaccaggagctaaataaatctgttttctttataaattacccagcctcaggtattcctttatagcaatgcaaaacggatttaagcaaactcattttagcttccacatatgagtgaaaacatgtttaactttctgttcctggcttatttcacttaacataatgtctttcagttccattcatgttgccaagaatgacaggatttcattcttaatggctgaatagtatttcattgtggatatataccacatttgctttatccattcatctgttgttggacacttagattgattccatatcttgactaatatgaataatgctgcaagaacatgggggtgtagatgtctctttgagatgctgatttcctttcttttggataaatgtgcagtagtgggattgctggatcatatgattgttctatttgtagtttcttgaggaacttccatactgttctccattgtggctgtactggtttacattcccaccaacaatgtataagagttcctttttcttcacatccttacaagcatttgctgtttattttatttttttgtctttttgataatagctatcctaactggggtgagatgatacctcattgtgattttgatttgcatatacctgatgatcagtgatgttgagcattaaaaatacatttttggccatttttatgccttcttttgagaaatgtctgttcggattatttgcccatttttaaattagattgtatttcttttgttgagatgattcagttccttgtatattctggatagtaatcccctgttggatgggtagtttgcaaacattttctcccattctgtaggttgtcttttcactctgttgattgtttatatcttttatttttttgagaaagggtctcactctattccccagactagaatgcagtggcatgatcacagatcactgcagcctcgacttccccagactcaggtgatcctcccacctcagcctcctgagtagctgggactacagccatacaccaccatgcctggctaatttttgtatttttgtgtagagatggtgtttcaccatgtttcccaggctggtcttaaactcctgagctcaagtgatcctcctcgtttagcctcccaaagtgctgggattacaggtgtgagccattgggcctggccttgttgattgttttctttgctgtgcagaagatttttaatttgataaaatctcacttgtttagttttgctattgttgtctgtgcttttaaaatcttattcataaaatgttttcccaggctcatgtcctctgttttcttctcataattttatcatttttggtcttacatttaggtctttgattgacttagactagattttcatataaggtgagagacaggggtctactttcatccttctgcatatggatatacagttttcccaacaccatttattgaagagaccttcttttccccgattagtgtttggaacctttgtcaaaaatccaaaaatcagttgacagtatatatgtggattaatttctggattctcaatactgttccatcggtccgtgtatctaattttatgccagtaccatgttgttttggttactacagctttgtagtatattttgaggtctggtagtgtgatacctccagtgttgttcttttcgcttatgattactttggttatttggggtcttttgtagttccatacaaactttaggatttttttttctgtttctgtgagaaatgtcattggtattttgatagagattgcactgttattttaacaatattaattcttacaatccatcagtatgggctgtcttttcatttgtttgtatcctcttcaatttctttcatcaatggttcatagtttcccttgcagagatctttcactttcttggttaaatttatttctaggtattttaatatttttgtagttattgtaaatgaaatttccttattaatttatttttcagctagtttattgtccatgtatagaaatgccactggtttttgtatattaattttgtatcctgcaacttcactgaattcatttatcagttctaagagtttttttgctagagtctttaggtttttctagatataagagcatgccatctgcaaatagggacaatttaacttctgccattccaatttgaatgtcttttatttctctctcttatctaattgctctggataggacttccagtgctatgttgaataagactggtgacagttgggcatccttgtgctgttccatttattagaggaaaagctttcagcatttccccattcagtaagatgttcactgtgtgtttgtcagatatgccatttattacattgaggtactttccttctatacctaatttgttgagaatttttttattatgaagggatgttgaattttatcaaaagctttttctgcatctattgagatgatcatatgatttttgcccttcattctattgatgagatgtatgatgtttattgatttgcatattttgaaccaactttgcattcctgggataaatcccacttgatcatggtatattatctttttgatgtgttgtttgattctgtttgctgatattctgttgagaatttttgtgtctctcttcatcagagatgttggcttcttttgttgttgtgtccttgtctcattttggtgtcagagtaatgttaaccttgtagaatgagttaggaggaattccttgccttttaattttttggaatagtttaagaagaattggtattaattattctttaaaggttcaacagagggtgtgggataggggtagggagtgcataccttatgcttctaatctggagcaatgcagctgtgcagattcctggcagctctccaaactggactcagggcttgcaagaactgtgagattctccttttgcaaggactgtaggtgtttgctctgtcaataggagttgatgaggtccttctgtttatcttttccatgcaataagaagtccctcctgactctaggcagattcaatctgagcaggggatacagggctgcagaggctgagtgcctgcatgctgcctttcgggactgccattcatcacagttgcatcttcactcccccaccgtactccagcaccctcccttcaacactccagtcaaatcttactgtttattcattgccttggtccttttttttggtgggggtaggggggcaggcagaatgccaggcatctctaatcaaccatctgctgacagcactcttccaaatgatctggagtttatttttatttttaagaaaaaattgtattacacagattctatatttataccttgtgctagtagacttaaggtcattaaaatataatggaacccctactttacaacagaagtggatatatagtcatctatagcatggtagaattcgaacatcatttctatggctttagtaactgtgactggctctatctggatgtgcaatttctgaggaaatgttaaaatcaaaacttgggcactgattttttttaaaaaaggaattatataaaactcaccaaaattatagtttttttccccaaaatgctcattgtgcttttaaaataattaatattaagtatccctctgtgtgaagaccataattatgaccatcatatcactatgtcaacaatgacctttgagagttaaaagaataaaagataggagagccatcttgttggtgcaaagaagattcttagaagtaccaactgagagatgaaagtgctggcctagaaactagtaaccttgtcatgatgtcattaaggcaaaggttcactacaactggagctaagagacaccggggttatctattttgcatttcatggttcttttttcctctctctcatcattttgggtttccagctgagacgttacaacaaagattagaagacctggaacaagagaaaatcagcctgcactttcaacttccttcaaggcagccagctcttagcagtttcctgggtcacctggcagcacaagtccaggctgccttgcgccgtggggccactcagcagtgagtacttgttattgtcaccattttcccctcatgtttcttcctacctctcagctcccacatagtgaagagctgggaggagcttagctgtagagacccttggctgcctttcctgggaagggccctttgttggttgggaaggtggggattcttccagagtgagagatggcccatgtgggtcatgcatctctagaaagaagacttttctgccacttgacagagagagaaccttctcaagtgcagctgcatcccaggtctgaagcatctcttgggaaactacccttctaagaaggtgggggtaatttcctcttgttgaggcagcttggtgtcctgtgatcatattaagcctgtaagataaacagatggtcccctctgaccgagcgatgaaaatccatcctcctcctaactctgccctccagctcctgagcaacatttgctatttgtgtcacccaaggctcttctgagattagtaatatatagagagcagttgctgcttctaatccagtggcttgtggtcctggctgcatgtttgaataacttagaaagatttaaaacctaccaatgtccaggctcctccccaggcaagctaagtcagaatgtctaggtgtgggaggcaagggtggctcccagatattggcatgcttaaaaaggctgagaaccactgctccatctacctttgtgttccctttctccctaggtaaaggtctgagagggaacaggtgttttatgaatgctatgagcctcatcacaattcaggtctggttctacttagttatcaacatggccacaacaattccactttatttcccacttccaattggtcctgacaatcacaagattttctggcctattcctattaagtgtacatggcattatacatttagtttatcttgatacctccctgaagcctgcctgcacagtgagaccaattactttcagttttgccagtagcatgtagcagagtgaatggcacctggtaggtgcttccttataactatttgcttagtgaactttttcatggttctcctcaatagagagtgaatttcacctcgccattttcattcttttctaatctgacattgagacatcattgcaacattgcgtgttcctctttcacacatgaggccactcccaaattgactttctctgtaattctctcattcttttatctttggggttatttcttgtcgtctactccagtcttgggaaaattttagcatgtaaaaatagggcacaaagattgaggcacaataaatttagctaatttattatgtttctatttatttaacaaacactttcataacagttactaaatgctttagaagttactcatttaatttatttccatttttgaaaattgtggtaaaatacacataacataaaattcaccatcttaagtgatggtgattaagtgattaagccattgttaagtatacagttcagtggtattgaatacatcataatgttgtgcaatcatcaccaccattcatctccagaacttttccctcttccccaactgacactctgtacccattaagcaataaatccccatcccttcccctcttccagtccatgacaaccacattctaatttccatttctctgaatttgactactctgtgtacctcatagaagtgacatcatacaatatttgctcttttgtgactgacatttctcatagtatagtgtcttcaatgttcatccatctgatagcatgtgtcagaatttcctttctttcaaggctgtataatactccattgtatggatagactacagtttgctcattcattcattaaaataactcatttaatgttcatgacaattctagggggtagtattattttatatattgatatctacatgtatagagatctgtatctacatctatacctgaattttaggatgaggaaaccaggcccaatagaagctaagaaacttaggcagatccaccagcaggtgagtgctgagggagacacaaacccaactgtctggcttgcatcttggccctgaatcagtgcactgtgctgccttttaagtctgggctggcaaaggctgctatattattatctctttagccatacctgcaatttggatggagagtgtattagtccattctcacattgctataaagaaataactgagactgagtagtttataaatgaaagaagttaattgtctcatggttctacaggctgtacagggagcatgatggtagcatctgctcagcttctggggaggcctcagtaaacttacaatcatggtggaaggtgaaaggggagcacacacattgcattgccagagtaggaacaagagagagagagaaaagagggaggtgccacacacttttaaacaacgagatctcatgagaactctatcatgagaatagcaccagaggatggtgctaaaccattcatgaagtatccacccccatgatgcagtcatcttccaccaggccctgcctccaacacttgggattacaatttcacttgagatttgggtggggacacagatccaaaccatatcattccacccatgttctccccaaatctcatgtttttctcacattgcaaaatacaatcatcccttcccaatagtcccccaaagacttaactcatttccagcattaactcaaaagtccaaagtctcatctgagacaaggctagtcccttctgcctgtgagagtctgtaaaatataaaaccagtcagttacttccaagatatagacattgggttaatactcctgttccaaaagagagaaactggtcaaaagaaaggggctacaggccccatgcaaattgaaatgcagtagggcagtcattaaatcttaaagctccaaaataatctcattttgactccatgtctcacatccagagcacactggtgcaaggagtgggctcccataaccttgggcagccctgcccttgtggctttgcagggttcagatgctgcagctgctctcacaggctggcattgagtacctgcagcttttccatgctgaggatgcaagctgccagtggatctgctattccagggtctgcaggatggtggcccccttctcacagctccactaggcagtgccccagtggggactctgtgtggggttccaactccacattccccctccatattaccctagtagtggttctccatgaggggtcctgccctgcagcagacttctgcctagacaaccaaacttttccatacatcctctgaaacctaggcagaggctcccaagcctcaactcttgcactctgtgcacctgcaggcttaacaccatgtggaaattgccaaggcttatggcttgcaccctcagaagcagtggtccaagctgtatctggacccctttgagccatgtctggagttggaaaaactgacagcagtgtgaggagcagtgtcctgaggctgtgcagagcactggggccctggggctggcccatgaaaccattccgtcctcctcggcctccaagcctatgaggggaggggctgccatgaaggtctctgaaatgcctctgaggccttttccccattgtcttggctattagcactcagctcctttttacttatgcaaatttttgcagcctgcttgaattcctccctcgaaaatggtcttttcttttctaccacatggccaagctgcaaattttccaaacttttatgctttgtttcctctttaaatataagttcaaactttaggtcatttatttgctcatgcatatgagaataggttgttagaagcagccaggccacatcttgaatgctttgctgcttagaaatgtcttccaccagataccctaaatcattaatctcaagttcaaagatccacagattccctagggcaggggcacaatgcagccaagttctttgctaagcaataacaaaattgacctttactccagttcccaataagtttctcatttccatctgagacctcatgagcctggctttcactgttcatatcactaccagcattttggtcataaccattcaatcagtttctaggcatttccaaacttttcctcatcttcgtgtcttcttctgagccatccacactcttccaacctcagcccattacccgattccaaagccagttccacattttcaggtatctttactttatagcaatgccccacttcttggtaccaattttctgtattagtccattttcacattattataaagaaatacccaagactgggtaatttataaagaaaagaggcttaattggctcactattctgcaggatgtacaggaagcatgatctggcatctgctctggcttctggggaggccttaggaaacttacaatcatggcagaaggtgaagggggagctagcatatcacatggctggagcagcaagagagagagaaatgggaggtattactcacttttaaacatccagaccttgtgagaactctatcacgagaacaccaggggatggtgttaaacattcatgaaagatccatccccatgatttaatcacctcccaccaggacccacctccaacattggggattacaattcaacatgagatttgggtggggacgcagatccaaaccatagcagagagtgatgcttttattctggtcttgcctaagtttttgatagaatatgattaactaaaagccagtgtcatgcattcttaattatattaggttacaccataaggacatctcttacatttgactgtttgaaacctgtcaaacattttatggggtttgacctaataaggcccccagaaaagtataggcctttattaaacatttatcaagccaatattaactgttggcttactttatgagctatcatcctctttccttttccttacaggagttgtctgtatactatgccagtgaatgttccattcactttttgagctcactgtgacctgatttctgtctctatcactcctcaaatatctaccaaagtcagcaatgactttctatttgctaaattaaaagacatttttcaattcttattctgctatgtatcatggcagtgtctagaatttttaataaattcattcttaaaactcccatttcccttggctttcatgatttcacccttcctggtcttcttgctacatttctggccattcttcttaatgtcttatgagctccttctctccctttcttcttaattttttttttttgagacagagtctcactctattggccaggctggtctcaaactcctggggttaagcaattcttccaccttgggctcctgaagtgttgggattacaggcatgagccaccatgcccagcccctttctctttaatattgttgttcttctgtcttctgttctagcttttcctctcttctcactttgtatcttctttctcagtggtctcaaatgctctgagtcttcagatactgtttctatactattttttcccaaatttctatctctagccctgatttatctccagaattccaatccacaattcagttttctattgagcatctcccttatttttacttaatttagtatctttttatccttaacattactatctctttatccttgccttttactaagtttgctatcttttaaactaaatttaccgttgttctccccattcagttccttctcctatatccccagtctgaatgactttcactgccatttacccagttacccaagcaaggactctgaggcatctctggatcctccctttccatccctccccacagtcattggtcaccaagtcctgttgtgtccactgtctgtctctctcatttccactcacttgtctcacctgcacgtcagtgccttagttctggtctttaacactttaaatctggattattgcagtggtctccttgctggtatttctgattccattattaccacctctcattcatcttccacaaggccatgatagaagtattatgttatgctcaatggctccccattgcttgcaggataaaattcatgttgcttagcatgacattaaaagtcttcacgatccagcccctgcccagctgcccagcatttaactagacattaccagcatctgcaatagacacttactgaaatattatatgttacccccatgttctgaatgtttctagattctatgatcttgctcatgccccattgttgttaccaactatttcccattcttccagacttagtgaaacaaatatccttgcaaagctctgctcatcagtcacactgcctctcccttgaatgacagcataccttgaatgacttcacttctgcttaggtcttaaatacatctgttttcttgaatatctgtttactctgacagatgataagctccttgaggacaagactgtattatatttatctttctatttctagagactagaatagtgtctggcccataatctgtattctatattcattgaatgtgtgaatgtgacacatatgcatatgtagctatatataggttcacaaacgtatatgtgaatatcgagagagagagagagagagagagagagagagagagagagagagagagactgacttcactttattgggattcagttgccctagaggaaaatgctccttcagcttttcttctgaaattgccagcaagaaggagttgcacagaatcttgacagaaccttggataggaggtcatttctggtcctttctcttccaccaaccagctgtatatggcttggtgtagttattgaacctctccaaactccactcccttcatcagaaaatgagggggttaaattagatcactggtttctaaactaaagttatttatgtattattaccgtaactagaaaataatgagttgaaattaactttctgaaatttttctaatgcatattaacacaattacctagttgctaaaatttttttaaaacctgcctttcagtgtgccagctacccactgctgttttcacagtgaccaccagggggccatggtggcaggctgaagctcacacagcccagagcctggacagaaaccgctctcacaggctctccgagtcaaggggtatatataatatttttgaatgagtggtgcttttcctgtagaaataaaatagttgtatcaacatgaacaatgttaaatactaattaataactcaaataagtgcctgctaacctttttgggatcaagtatttatttattttgagaagctgatgaaagctatggacttcctctattgcaaaaccacgtgtacacatgtacatatatgaaaactattgagtgtattttcaggagactcacagatctcctgagttattcgttcactccttagagggtctttggttcccaggttaataaaatttagtttaggataagatttaagaagctgtaaacatccagatacaatcagatcctttatgttttattatttttgttgtcactttgttcttaaaaatcacaatttaattcagcttttgagaaacactgtttaatcctctgaactcgtgtagaagagcaccctgggttatgttcagatcctgccagcagccaagagagctttaactatcttcaggggttaactaggttcctctgagggcagatatcggtactcaaatcatttgacccctcttctgtggggtcctctggcccagtggatttgcttgttggaggaataacttttgtgatatcctcttgattcctgtgggaagttcatgtatctttgccacaacaaatggtatatgctcaggccaccctataatagaccctctctgccctgctaggtctctctaattcctttttccctggtttacggggcagcaacacatcagaagtgagttccttagacaatgctgcagcggacagtttgggtgccctgtgtcccaatccctcggcctccctccgattccctccacaactgggaaccgtgctcacagtcggctttccactcaggcacccaacaggtttatcaggcctgtctgcacaggtgttctcggaacctgtgtgaggaggggtgggggtggataatgccccagcctacccagcctcttagggaacagttctgaggcatgctccacactgtttttttttttcttttctaggaggttcctactactaggaaccttttggccaatgggttccatttgtccgtgtggtgaccagctccacagtgaaccttttattgaattttcctctttctcactctagtttcttgggaatcacttcttcaaaatcaacctgtactcaggtccctgtctcaggctctgctgttaagagaacctaaatatagacagatatccacattagagaattagatgtcagtcttccttcttgcagggcacccccaatctttgtgagtgaatctagtggattttttttttcccactgggtttgagtagaagagtttactcccatgtgggccaggtttggataggcaaaccatggggtaggggagaaaaacgcgtctctcatgaagacccatttcctagatggccaacaggtgggtgggtattgagagtggtggttgattgcagaggtgctggttgagcagccccaggggtaggatgccccactccatcattagagattcagaatgcagagcgtttaggtctaagtccttcagctttagtttccaactctggagcaacaggaaatttctacctcaatatcctgtgacaacagggattagaagagaagagagaggcttctgttcctactgtgtcttccatccaatcaaaggaaagttatttttcctttctcctaagagagagagttggcctactatcatcacacatttggaagataattttctcatgaatacattgcatttctctaactatacaccccgtgcatttttccactggatcttcaccaatatgtacgtgaaaactggtcctatttgtaaccgaaattgtgtgtgtgcatgtatgtgtttgtatgcatgcgcacacaaaatgtcctttatcgaagaccttttcccaggggataacctcaaactcaagcaaacaaaatataacaaagtttaaaacaaagatctatcatggttttccagtggggcttatcaaggcagagccccagtttgcctgtccacatatttcccactagcatgcttcctttgagatgggaacagagaagatgaatgttgtgcagcaccatgatgcttttgggcagagtcattcttcctctggccaattgctcctcaattgcctttgaaacatgtgattctttatttccctttggttgtcatgtagggactaacacagcattcagtgtcacagaattcagtgatggtcagctctaagcccttgagattggaatcaagatacactgtatgagaccagaaaataactgttacagacacattttacccaggatataaaatgagatggctatgatacaacatgaaaattatcattactggctggacatggtggctcacacctgtaatcccagctctttgggaggctgaggcaggaggattgcttgagaccaagagtttgagacaagcctgggcaacatagtgagacccccatctctacaaaaaaaaaaaaaaaaaaaaaaaaacaaaactagccaaatgcggtggtgcgtacctgtagtcctatctacttggaaagctaagtcaggaggattgcttgaactcaggaatttggggctgtagcaagctatgattacaccactgcactccagcctggctgacagagcaagatctcattgcaaagaaaaaaatatttgttattaccaacaaaccaggatatatttctgaaccccaaatcagatcaggagatggggaaccacaagagacagtggcatgccctgtgtcccactcccaggagaccaactccagacccttagtcatggcctcaataagagaagggagaaaggacaaggggggaaactaagttgtgagccacagaggacttctcagaacttgttttggaactattggattataaataaaagctcccaaataaaggtcttccatatcatcctctttgttcaaactcaactgaagtctgtcctgaggccagtggcatcaggcataactattatgaacccagataaatattcatgtgcctctcttgccgggtggtcatttctatgagtgggataagactgtataaaacaatgaaagtcagtttcctgaggaatgtgacttctccatgctccttactttttagacccaaatcatatatatatggaagaattataaagttacctgtattgtctctggcaattttacaacattcttttgtgctctcagaatggccttggtaatttagggcatcgtttattgaatgagcaagctatttctaggtgtaaagtgcacttcattggttctatgactggcccaaaccccttctttatcaccatcttcccaaagagggagagatgggacacacaagtcatatgacataaatttgataggatagtcatcagtagggagcagcaattagcaaccttaatcagaagagttatacccaactcttgttgccagaaatagtcatctgaaaggtggcactccctcaggaccgcatttttctaactgtgatgatgagaacatcggccttgttagttttggtcctttctgagactaaaattctgcgattccagcagtggcacaaagcaatttttctggtactctaacaacattaggggtctcagagaaggacctcctgtgttacatgtgaagatgcgtaaaccacagcactgtcactagcagttccggtgcaggattttctcacaggtggatttcctggcttctccttgccctgtcaacattctcacttgcagagccttctgaaggtggcctctcgagcaatgccaagggcactagagggcccagggggcctgagtgctgggctgggaaggaggtggcaatgtaggctcatcacaggcgtgcaccccttaacaagccggcacaggaaccacagacacctagacgatttcttcattcttttttcaatattcctgaaatatgcattcaaacagtcacatggtaaaaattgtcaatggaatgaaaacatttttcctgtgcaatttggagctaattttttctgtgatgtaggatcttattttatgaatggattttatcctcctttaaattattgatggaaaaggccaagatttttcccgtactggggtggtgccgatggagacctgtatgacactgtgggttccgggtgtgatcttggacacctgaatccccattggcactgagtgctgttctaacattctaccctgcatgtttttatttcttgcccctgagggatttgctcattttgcatactgattagtttatagcagcgatgctaatttgcagcgacatcagggattacactttgagaattattaaatataaaggggacaacattgcagaacacagaggaagcctgactcagaggacagaagatttgaaagacggaagcctgtcccttgcttcattactgagctacagtgtgtcctggggccatcactcagccatctgtggatccctttctctacctggagtaagaatatgagagacagacagaagagttttggttaatcacaggggattttcttatggattaagtaatgaatgtgattaatgataatatagagaattcccagttacccacctgtagctactctgtagctaattttcaattctgtgttgatttccttcaatgactctcatcccgacccagatggtatctatttaggaaattcaagaaacttgtactattagcataagcagagcaaattggggaataaattagtgcaaagaaatgatccaatgcaatagaaaagtgaatataaacggcttctggattttctaggacacagactcattgaatcattctataaatatttgccaagcccctactaagtgctgggcactggggccctcaccatgagatgagctcagtcccttccctccaggttcacagtcaggaacgagtaactgcaaacaggctgagactctgcagcccagaggaggaagtgcgtttcgttcccaccgacatcagtacctgatagtagtaggatggttttcttccagacatttcttctgatgcatataaatatcctcagacacattttatctttttttctttctcttttcttttttctttcttctttcctttcttttcttttttcttttctttctttctttccttctttctttttctttctttctttcccttccttccttcttttctttcttttcttttcttttcttttctcttcttttcttttcttttcttttcttttcttttcttttctttattttctttcctttcctttccttttcttttcttttcccttcccttgcctgcctgcctgcctttcctgccttcctgccttccttcctttcctttctttgtggtattgattgccctgttgcctaggctggggtgcagcagcatgatcatagctcactgcagcctctaactcctgggctcaagtgatcctgccacttcagcctcccaagtagctgggactacaagcacgtgccactgtgcctaatttttagttttgttttgttttttttttttttttggtagagataaggtctcactgtcttgcccaggctggactagaactcctgggctcaagtgatcctcctgcctcagcctcccaaagtgctgggatgacaggcttatgctaccatgcctggcccacatctttcatcagaaagtgagtgctttggacatgagtacagtgttcattttcccgatacaaacattgagatcctggggagatcaacagcaagcttcttgaggatggaggcgttctgtctccatccccaaacagccccagtgtgagggtggggtctgtatacaggagatgctcagtggtcatttatcaagtcaatttgttccccatagttcgctccatagggaaaacatttttgttatcatcatcactgtcattcttattttaaaaatgaagaaggtaaggttcagagagattaggtaagtgcggtgacacggtgtgaaaaaggcagaaccaagacccaaagcgtggcctctgcctccacaggctgtgcactctccacgttgcactgccctgctgatagccaccaagaggactcaaacaatgggtgtgtgtggatgtgactggaaggcaggggagatggaagttcctgggcttgctgagaacctaatggtgtgtggtatctgggaaagagcaggaacctgggactcagcctgatccgcattgactcctaaactctccttcctgctgtctgcatggccatgggctagaccctgacccaccgggactcggtttcctcatcagcaaaaccggtataatagcatcttcatcttaggtctgtaatgagaagcgaatgtgatcaaaagataacgtctggtgaacagtacgttcttgattcatagtactttattttattattatcagtttaaacatttttcttgatgctgctatttgcctttaagcatatgaaacaaagaatagatttctaaattatgtcatatgttacaataagtgacctttaagattattcagagaatccgatctttttggtagacttaggaacaaaagcaaggttcctttttctgtaactgctgttttctaacttacaaaaactgaggtgacatattttctagtattgtttctaaatgtatgaagcctgcttcattgcaccatggttggttggttcacttatttcgtaagtgtcaagttaagactcagcaagggggaagagtctcccccagctttaaagtctaccatcattggtccatgccttgcaattgcccatttcttcattgctttgtaatttttctgttgatgcatttgtctctcctgctccatggaagaaccaagaactgtttagcattgtgtccccagagccaagcacaatccatagtacataccaggcaagctcagtaatgttttttctttttctgaatgaatgaatgaaatggggtaggagtaaaaggagacaaacatagcacaacatatattaggatcagttactcattttcttttctaagaaatgcggaggcagtgcgaccctgtgttaatatataaataagaacatgcagcttcacgcttctcctcattgagccctgaaataagtacaaaggtggcagacaagatctagctgtgtgggagatgccacggaaggaggggatagctttaatttggcctttttaggatgctgagtttatgcctccaagtgtcagagccacagatgtctgctcctctgcaggggaagatgaccttgaaggtgatgttattgatgagctttatttaaaacacagacatgttcaagagctacaagactaattggctatgttaaaatatttaaatcaaaagtgcagctacttagtgtgtgttggcaaacattttatgttacagttgtaaaaatgatacatgctcactatggaaactttagaaagatcaatggaaagaaatgattccaccacccagagataagagctgatagcattttggtgaatatttttcttttattttatgtacatgttattaatatttttacaatggttcatttcatactttttgccataaaacctgctttagaaaaaacagcaataaatagtgaacattttccaggccagtgtatcttcttgtgtgacctaattttagtggctgcttagcattgctaagaggtcctgatgctggagcacgattagagtattttcagtcttgggctactaagaaaaaaacctgatttttgtagccgatctttgtgtaaaactatgattatttacatgcaatcaatacttggatgtgggaatgtagaatcccaagttatatttaattttaagtctcattcttattccctactctcaccaaagacttatggtttgggaaaacctttgccaggccagtttgttaggtgaaagatgatgttttatgttgtttggattttcatttaaaactatctttggaggctgggcttggtggctcatggctgtaatcccagtactttgggaggccgaggtgggcggatcatcaggtcaggagatcgagaccatcctggccaacaaggtgaaaccccgtctctactaaaagtacaaaaattagctggctgtggtggcgcgtgcctgtagtcccagctacattggaggctgaggcaggagaatcgcttgaacctgggaggcagaggttgcagtgagccaatatcatgccactgaactccagcctgggcaacagagctagaccttgtccaccctacaaaaaaaaaaaaaaaaaaaaaaaactttggataataatcattttccttaacacttcatttatttctgaggtgggggatcttgctatgttgcccaggttggtctcaaattcctaggctcaagcagttctctgccttggcctcccaggtagctggaactacaggtgtgcatcaccacgctcagctgtattccatctttttggaatttctggttggtgcacttgtcttttccttcataatttgatataactttttataaattagcaatattatccctttttctgccatatgtgtagcaatatatttttccccacttgtcgttcgcctattagttttagttgatggtgttttcttggacatagcttccttgaattgttgacgtagttttgcttagggtaaattgttttcctgcccacctgcattccattagaaatggattgttttaagggtgaatttgtcattctttggtgacaaataccaacaagtctcctttaaagacagctcaccaacataaggcccaaacctgtgccacattttcactagcatcactgtcaccaaatatgtcaactccggcaagaataagagaaggagcctaaaagattttaagtggttttgacagtctttagcaaattttttctgagaagctcgcatccaagcatctgcaaatcagtcacccctccttttaatctccatcaaggtcagctctggaatttggccctgtttggatagtccaaggcagtgctatccaataaaatctagtgtgagccatatacacaattttaaatgatctagtacgcacattaaaaaagattaagggccaggtgcgatgactcacacctgtaatcccagcactttgggaagcggaggagggaggatcacttgaggtcaggaattcgagaccagcctggccaacatggtgaaaccctgtctctgctaaaaatacaaaaattagctgggcatggtggcacacgcctgtagtcccagctattcgggaggctgaggcaggagaattgcttgaacccaggaagctgaggttacagtgagccgagattgcaccattgctttccagcctgggtgtcgcagtaagacattatctaaaaaaaaaaaaaaaaaaacaaaattaagaagaaagttaatcaagtgaaaattctgccaggagctcagttgcattttctagaactcttggcctaattttattaagttcaacactgtgataagtgctgggaataaaaaaaaatgtgatgtgggctctgcaagaagtgtatttctctgtgattaaagctgattgtgggagaaaatcttctgaaaccctcagtgacaaccttctcattgactagtgactcaaacagtagtgcaaagcagaagattctaaatgagcagaggaagggtggatgccgtaaaggcaagggaactggtgaatttcagaaatagtgagtgtgaattcaatactcctaatcatttgaataaagatcttgttatatttccccaaaattaataagaaacaggtgaaattaattttaacaatacatttaattcaatatatccaaaatattatctcaacatataatgaacttaaaaatattacgaatgagttattttgtactctttattttcatactaagtccttaaaatctggtgtgtgttttacacttttagcacattttaatttgggctaaccatgtgtcacatgtggtcaggggctaccttatcagacagtgcaggtcccataatagtattctgactaaggggaaaaagcaaaaatcacaagagattgtaattcaggtagaaacttacattaaggagctcatcctaaaaacaggtaagtaccctcctaagtatgagaacagatgggggccacttgctggagtttcttactcttaaaatacttgtcaacatgaggatttcagcttctgcatacctgtaccaataggtatgtgttgttttaagggccagcggagatgacacccacaccccactgagaatggagccgaggctgttggaacccactgctcaggacagcttgcacgtgtccatcacgagacgagactggcttcttcaggaaaagcagcagctacaggtgagcaggtgaaagatcttcaagaaatatgatggcatttttcttttctttgagacagggtcttgctctgttgcctaggttggagggcagtggtgcaatcatagctcattgcagccttgagctcctgggtgattctcccacctcagcctcccaagtagctggatctacaggtgtgaaccccatgcctggctaaatttttttatttttagtagatatcaggtcttagtatgttgctcaggctgctcttgaactcctgggctcaaagaatcctcctgcctcagtcttccaaagtgctgggattacaggcgtgagccactgtgccaagctggcatttttcttatccatttaagccaaatgcagccaagtgggtctttgctttccttgagtgtagcaattagagccttggctgtcaagccggggagtacaaaaaggagagatggtgggaatgactagaaggcttgtaggaatctcattacaaacgagggttgaaagctcagcagcatttgtgcctgttttcgatattcctcattaccttttgaatatgcttttcttgtctgccaggccaatttgccacttcttatcattttgacctttagaagcttcctttgaaaggcagaaagacatctgtgctgtgaaaatcctttatggaaattcctatcatggtagactgtgagctgcagttgttaagagacagagttgtaagtccggactgagcaaggcaggcacatctggaatgattagccggctgcttggaagcccaaggttggcccagaacagaggatgcaagttggctaagaatcatcgaggggctacaaatctgggtgcagcactgagttaaagccagagctctggaagttgacagggcaccccagaggcagggaatcttgaaacagggtccatgcctgcttgagcctggagctgtgaagcatgagtggggagcgatgaggacacattgattagaagcaacgtgacttcatgggaagagcataggtcttcaacacccaagttcaaatcctggcttaggctggaggcttcccatctctgatctggtcatagagtattcgtgttatctgaatttgccccatccaggtcactgcaagagtaaggtggcaaagggaggaaaaagtcagggcaatttatttgaaattatttcccccattaactgagcacttacacagtcaatgtgcatcattataacgtttggatagctgaaaatgtgaaatctggtttttgatttttaataacatttgccaattaaaggtctacacaattcctgagacagtcagagtgtacagaaaataattttagccctgggcacttagtgtttgaagcactctgggaaaggtacttgaatattcatttattcaacagacatttattaagggttcactaagtgccagatactgtttgaagtgcttgagattcctggggagcttttgatccactaggggtgagaatggggagatagacaataagtgataaacataataaaacctctattagacaactggtatgttatagggtgataagagcttcacagagtagactaagatgatgtggaagaggatggagtctactcattgagaagtgagattggacccaacagttcaaagaggagagggagtaggccttgcagaaatttctgcaagaggatcctgcagggggataccaacatgaaggcttagagtgggagtgggcctcctgtgttcagagggcagctggaggcccatgtggctggagcagtgtaaatgagggggaggatttggggaggaagtcagagataaaggggccttgtaaggatgtggacttttctcagattgcaacagggaaccattggatggtgttaagcagtgaagtgacatgatctgaccacattgtaaataatttgactcctgtattaggaataggatgtaagacaataggaaaacagtatgcagcttccttaaaagattaaaaattgattgactgtgtggtccagccacccccccttctgggtatatatctgtctcaaaaaaattgaatgcacagactcaaagagatgtttacacacccatgttcatagcagcgttatacacaatagccaaaaggtgataacaactcaagtgctcatcaacagataaatgataaacaaaatgagtatgtacatgtaatgagatattagtctcggaaggaaattctgacacacgctacagcatggttgaaccttgaggacattatgctaagtgaaatacactggttgcaaaaggataaatgctgtatgattccacttgtctgagttacctagaggagtcaaattcatagagaaagtagaatggtgattcccagggacttggaggaagagaggataatggggaattagttttcaatgggtacagagtctcagttttgcaagatgaaaagagttctgtggatggatggcagtgatggttgtacaacagtgtgaatgtacttaatgccactgaactctacacttaaaaatgctcaagatggtgaattttatgctatgtgtgttttaccagttaaaaaactaaaagaaaaagaaatgaatagggtagaggaagtcaaaagtggaggtagagaggttagttgagagactttgtcagtaatactgtaatcttggagcaattggggacactgaggcattacttttttcttagaatgtcttggtagtagacattctttagtaactcccaattcttctccccactcccagacttgaagtgggttcaggaggtagaagttgtaggtgatgcacctcggggctgagagaacgtgaataagaggttaggagacacccaggattagagttgcactcttatccccacaaaacatgggagtatgttaattaagagtcttattttttattcagaatcatatgggcagtgagacgatgatctactataacactgtgcacatgacgggcattcattacctgctgcttgtttagttaattgaccttaatattaaatgatattttatggattatttggatttcagtttgctatattcgtagaaattaacatttatttatattttcatgaactttagactgcatggcaccatctgcagcatctcattcttctctcagtcctgtagacttaagaagccattttttacctttctctgtactctgaattcttgtgtttggggacagactaacaaagggtcagttgcatttcttgttttggtctgtggctggggtaacctgcttagctcagacctcaggtgcatgaggctccctgccctgtgtcctaactcatccatccgaaatgaagtaagtcatttatgtatctgctgggttcttccaagtcaaattcttggctcaccccccatagttatttaatgcttgggagggaatgtttttccttatgccaactcattagaaatataaagctggcatgatttttccagttcagcaaacctccaaaaatctgcctgcctcagaaggggagttttgtagttctggtgcatatggccaattctcatttaaacgagtcattatcctcagagcagtttgccatgagcagggttaatttataaaatcttgtctcctcattctctacagaaagaaatcgaagctctccaagcaaggatgtttgtgctggaagccaaagatcaacagctgagaagggaaatagaggagcaagagcagcaactccagtggcagggctgcgacctgaccccactggtgggccagctgtccctgggtcagctgcaggaggtcagcaaggccttgcaggacaccctggcctcagccggtcagattcccttccatgcagagccaccggaaaccataaggaggtactgctgatttcctaactgattttgggtcgctcgcctctttgacctgttcattggaatgattttgtctgctgtctttcatttctaaacatttcccaagcagtctgtatttttcagtggaagcaccattggtgttttgggtgggaaaattcttcacggtgtggggcagtcctgaacattgcaagttatttcacatcctggccacttaacccactaaatgccagcgaccctccccattccaatatgcaccctccccatttccaaacaccctcaggacaccctctctccctttgagaactgttggaattcaattggttagagatcctaatgccaacttttgctgaggacgatcatctggatgaactatgcctctcactaagggaagaggcaagctattgagagagggacacccaatggcaaagttcccatctggaagaatggattgttactggtagctaaaatgtattgggtgcttaccatgtaccaggcagtgttataagctgactctatgagttacttcggttgttgtattcattttacaggtgaggaaaaacgtttaagaaggttataatttgcccaaagtcctaattaataagagagaaaactgatatttacactcctgttcattaattctgaagcccggtcttctccactctactctggagtgagaatcatccctgtattctgtatcatggaatgtctataagatacacatctactttttgccctttatttatttatttatttttaagagacagggtcttgctttgttgcccaggctggagcacagtggcacaatcatggctcactatagcttcaaattcctgggtttaagtgatcctttctgcctcagcatctggagtagctggaatcacaggcttgagcctccacatctggctatttttttttttttttaagttttttgcagaaatggtgtctctctatgttgcccatgctgttcttgaactcctgggctcaagcgatcctccctgcctcagcctctggaggagctgggaccacaggcttgggtcaccacatccggctatttttttgtttttatttttttgtagaggtgaagtatttctatgttgcccaggttgctcttgaattcctgggctcaagcgatcctcctgccttagcgtcctgaagtgctgggattacaggttttagccattgcacccaatctttcttgcccttcaagagctcatactctcatttctgagacatacagaacgcacacttacacatgttggacaaaaaagtgagtggcacccgaatgggtagatgagcagtaaggactgcaagtgctacgtgggtagagccgggagtgggagcaatggtcggcttggccactgtgctgaagaaaagacttcctacaactcaccacctgtagtggttgagaatacggactctgccacctgattgtctggagttgaaggttaactcctcactcaactcattattggccgatttgaggaaaggggtgttgataataatttctaccttatagagctatcacatggatgaaccgaggtagtacatagaaaactctcagcagagcctggatggtactaagcactttattgtgcttccagtcgtcgtctttacaatggaaatttcagtcttctgaaggccttcaaactacccgtccaaatatatcttactgtatttagtgaacgactgttctgtcttccacatgtatcacatcctatccagcctataaaagcaagcggcacatgctattctagggagttacttaagatctcctcccattccccttctatcccgaatatttccaggcagaactctccatggctcatgcccatggagagggggaagagatttggattgttgccggttttcatccaaatgaaacgggtcccttgaatacagcttgttctctcccacctgcactttcagaaccattcttcagctattgccttggtgtggtgggtaggctgttatgttctcattttgcaactgaggaatcaaaaactcagaaagtttccctgatgatgtagctagtaagagaccatcttgtgtacaactatggctgtctttgggcctgaatcaataaaagatggtttccttccagagagccaaggaagctatttctatgactaattctctttcctcatctaaaactaggagctccacagtgtggttggctgatagaactgagcccaggacttggtctggttttctacctgtatcctctggtttgccttttaatcaggatgagtcacagagaaggcatgaatgtgtgacttttactgagtaatctagtgctttgataggtttttatttgtttgtttgtttgtttgtatgttttgagatagagtctctctctgtcacccaggctggagtgcagtggtgcgatctcggctcactgcaacctccgcctcccaggttcaagcgattttcctgcctcagcctcctgagtagctgggactacaggcttgtgccagcacacccagctaattttttgtatttttagtagagacagggtttcaccatgttagccaggatggtcttaatttcctgacctcatgatctgccctccttggcctcccaaagtgctgagattacaggcgtgagccactgcgcccagccaattggataggttcttgaaaggcatttcaaaagttgtggctctctgattttatgatgctgttagggaaattatatatgaggatgatcttgaacatggggcactgctgtctgtggggtcctctgggagaatccaccatccccaatccgaacattcccactgagattacagaggtcaggtcaagaacaggctgccacgtttttgtgctgaggtgactataggaaaacctgggtatctcaaggactttcagaaaccatgaaggcttcatgtaggaggagatcttgggaatgtaaggatgaggctgggaacagtggctcacacctataatcccagcactttgggaggccaaggcgggaagaatgcttgagtccaggaatttgacacctaatctctacaaaaataaaaaaataaaaataaaaaaaattagccaggcatgattgagtgtacttgtagtcctagctactcgggaggctgaggcaggaaggttgctcaagccctggagttcgagattacagtgaactatgattgtgccactgcagtccagccagggcaacagagcaagaccctgactcaaagaaaaaaaaaaggaatgtaaggacgaagagtttcatgggagggtaggaataaaccagagcagttaaaaggtacaaaaaacctggacaatctaatgactagttaataacatgacctttttctcctgcgataaggaagttatacaggtgcctgcagcatggaacactcatggtgagcagaggccatcagcactggctggagttttgtgtggctggagtgtggccaccctgagacatcctcattatctgggtgattctcaagaggtgatccttggcatcagtctaatttactttgaggtgcagggaggtatcgccgcatctggagggcagtgtgggctgtgtaggtgcacactttgattggtcagcttcctttcttccaccgtagggaggtgaggcatcagactgctccctgccgtaaccatcaactagagaaacccgtcatcaatatttgggctttccatttgagaaggaagatatgtcttttccaagctgatgggctgcagcatggatctgcagaagtgaagcatttgaaagaaaccagtgtagaaccagctggctcaacaggtcagagagattgcttggtctagtatttttaactaattggacatgatcctgttaacctaatttttgctatgaagtattggttgtcttttagaaaatgctgacttagggataatatccagtaggtatatttagccaaatgaacccatcttacatacatcaatagctgccttcattgttcatgagaataggctcttcttaggccagatggagagagccagacaaattgtgaaacaggaaaaccttgaagtcttataaagagaagttgcagagactagtattgttacaaaacctagagaaacagatcactcaacatcacgactgttatcatcatctataaggattttcatagaggccagatacaaactcagggtgctgtctgtttgtaatttactcaactttctaacatgcaattgcaatatgctttgtttcgtggacaacgacccaacaacttgaaaagaaacttcctaatagcatgtgacatttctggatgtatcactggtggagacttacgtgcttacatggaggccatcgtttctgactgtggcttgttgggaaccccctggccaatgtcagagatgggctggaagtagagggcatgtgctggggtcaaggacacccagtgattttcggtttgggtgtgataacagaaatcaaagaagccatttgaattttccaatgtctgtgttctggatcaaataacttagcaggaggagatgaagtgttaccatcccagagacatcatagacactttttgagtagagccaacaaaaatggttttcttccagtgaacaaaaggagaaccctttttaagcactggagaatgaggagctccacagtatggaagctgacagagcaggggtgcatgaaaggacaggaaccacttaaaagatatgttcatttgaatttctctcatccctgggatttcaacccccctgctttaaaacaagtgccttgttttctcctgcaagtcttcctttgatgtgagggtcttagaagaaccacttttacccagtgagcttggttcttctcccacacgaaacccatggttcttgttctaccccctgctgactgcattcccattctctgtaatgggattgtgatgtgggggtgggggagggaggagagggaaaagatgggggacacagggaggaggtgacagtgtccaagattttctgtggatcacatccctccatgtgggcatgaggttccatctatttatttggcgtaaattgaggagaatggtgatttgcagctcctctctgtctagcaccattagctcagcctcccctggcttcttgttggttttatgtgtctggaaaaccaggggagggcagcctgtgacctcatgtagcatgcatatggctaacggcaaagtgagggaggaataattatagtaataatcacagtgatgacgtggagggctgcctaggatgctttctaacattctttagaaatgcttgactggcttgtattcatctggggttgagttcttcattcctcagctcctcggatttttcatgcttcatgtgaaatgtgttctggcagctcatggatgaattgtcgcttgttgtgcatttggaagaaacatgtcacatcttttgcaaaccattggcacaaagtgtgaaacaaactcaacccctggttacaggagggctggctgggccttggttggagagtctgggagcctcgcggcagggctgggctggggaggctcgcgggtggagaggagccaggccttctgcagtatccatgcccccagccactagctaaactgcccagggctccctggcggggggcactgattatgcagggtgctgcaggcatcctcatcacacctgtgctcagtccacaacatgcagtccctgctgatgtcagtcctccttgcaagtgagatttgaaataatgtaattcaccagctcacaactgaatgggaaaaaaaaatcaatagttcctcttttccctcagaaacatatcttattagagtgaggagacagtgaaacagcaaggcctgaattggaaaactgatcctgaatctaggatcctggtagagattctcaaagagggttgcgtggaagcagctgtgtgggaggggtcccattaatgctcttgccccgggggtagtgcgaggcagccaccaaactggagtcacgcacagactgcagagaatatccctgcagcatatcagcagtctccaagctgcttttccattcgtgaagattgttgttctttaatctccacttctgggctttgtctttctctctcctctgtctttgccttctacctgactggtttgccaagacaatggctttatgggactgagagcattagacatcatctggagaaagaggagagctttgcatttttctaggaaattctgattttccccctcttttttttggtaaggacttttctctcttttttagagatggggtttccctctgtcccacaggctggagtacagtggtatgatcatggctcattgcagcattttactcctgagctcaagtgatcctcctgcctcagccttccaagtgctaggattataggtgcatgtcaccatgccaggctaattttttaattttttatagagatgggggtcttgctatgttgccaggttagacttgaactcctgtcctcaagtgatctttccacctcagcctcctgggtcactgggattacagggttttcttttccccctactcccctttttaagtaaagtagacatcttgcttttctcaggaattcatgaggcagaaaaatatttgccaagacagcaaatgcagtgagacagaagtgtgtgagcaatgctggccagatgggtgcccggagtgaggcttccctgcataggcgacatctgcagcattcaggacctccctgcaggtgtgccctctccactcaaatttatcctgtctgtccttcttagttagactggtgttgatactcatacactaattttaatatctctgttatttacaaactgtcatacttgcttacaataaccctataaggtttgttgggcaatatattgtttttatgcccattttgcagatgaggctgctgagggtccaagttcacacagccgtaaaagcagtgccctcacgtctttggcgaatttttaatgcagagggaatccagagatggttcacactgatggcctgggagagaccaggccttggacagagtgcttagtccagcaatggaaagaagtccagcccagcagagccgtgggtctgtgggcccaaggaaaagagaatggatgtccctccaggccagggatggttgtctctgtgtgcctagtgttgcctgattggattggagccaaggtgtatctaaaaatagacagcctgggaagaccaaacaggcaactgtctcaagtcagagaggtctgtcagacgttccaaagaaagaaatgtgagaggaagagaaactggaaagcaaggccccgccccagggctagaggaactggtattacttgtctgtgaaaagagggtttgaactgggtggcgtggaaggtcttttctggttctacaatactttgcactttagtattttatgaaataagttaaaataagctgcctaaaaacccctcataattctattcctaggagctctatgttaagttcctccttaaagttccctgggcaggctgtgaccatccacaggccacggtgctccagctggcactttccttagggctggtccctagagcatggacctgagcaaagcctgctttccaagcactgctgctgcagctcagagcttagacctcgcctcaccattgtatatcctcccgttttcttctggaaagtcgtcattacaggcaacgtggaaaagtttaccagactataatctggtaaaggaggaagaggattggaaaagaaggaagagatttgaaaatcccccttatctggctgggtacagatgctgctcaccaggaaatgtaggttcccaataaaacaggacccccatttccagttttcattgcgttgtaaattaaaaataaaatcttaagcccccaaccactgaacggattccctcttggccaaggagaccccagagactccatacaaactgagttcccagccccagtgggccgggaggtcggatttgccttgttataatccctcccttttgtagcttagacataacaacagagcagcatcaatgctaaaacgagatcataagaactgatggaacagactctcggtggcaataagataccaaattataaacaagacctaaggccatgccaggcagggataagtctcacacccctgcacctaaagagtaaactaccttctgactgccacctgggttttctttttctctagcggctaaacgagcactgtcctagagatgagctatcttaaaaccatggcagtccttgcaccgccagatgctgactgactgactctctgttccaccagctgtaactgcagctttcattagaaaagagactgatttcagtaactttcttctgatacaaagaccaactgtggactgcttctggcctatttagagacacttgagtgcctttgtgttctgaaaagaccttttacatagagggcctaattgtaatacatgtaaatgttaagtctccaccctaaggtgaacataagttgtatataacatgtatgcttattcagtatgcatgcattaggaccaccttcatgaatattcatagctcctgctataacctgtggaatatgtatacttggtcaacctattcttgtttttttttttttttttttttttttttttaagatggagtctcgctctgtcgcccaggctgcagtgcggtggtgcatctcagctcactgcaagctccacttcccgggttcacgccattctcctgcctcagccgccggagtagctgggactacaggcaccggccaccacgcccggctaattttttgtatttttagtagagatggggtttcaccgtgttagccaggatggtctcaatctcctgacctcgtgatccacctgcctcggtctcccaaagtgctgggattacaagcgtgagccaccctgccggccttggtcaacctattctgtgtaaattcctgtcttacctgtccctcccttaaagtgcctgctaatggcttctgccggaggctatgcttcccagcctgttagaatggcaaccttgcaggctgtaacccccttttaagaaataaagctctccatattctcactcataggtgggaagtgaacaatgaggtcacatggacacaggaaggggaatatcacactctggggactgttgtgggctggggggaggggcgagggatagcattgggagatatacctaatgctagatgacgagttagtgggtgcagtgcaccagcatggcacatgtataaatatgtaactaacctgcacaatgtgcacatgtaccctaaaacttaaagtataataaaaaaaaaaaaaagaaaaggaaagaatgaaaaaaaaaagaaataaagctctcctttctaaattgataaattgtgtgatttttaagttaacaggctatatttgagaaactcaagggaggaattctgttttacttgcagatgtaaaaaaagactttattaacacatgaaaaaatgctcaccatcactggccatcagagaaatgcaaatcaaaaccacaatgagataccatctcacaccagttagaatggcaatcattaaaaagtcaggaaacaacaggtgctggagaggatgtggagaaataggaacacttttacactgttggtgggactgtaaactagttcaaccattgtggaagtcagtgtggcgattcctcagggatctagaactggaaataccatttgacccagccatcccattactgggtatatacccaaaggactataaatcatgctgctataaagacacatgcacacgtatgtttattgcggcattattcacaatagcaaagacttggaaccaacccagatgtccatcaatgatagactggattaagaaaatgtggcacatatacaccatggaatactatgcagccataaaaaatgatgagttcatgtcctttgtagggacatggatgaaattggaaatcatcattctcagtaaactatcacaagaacaaaaaaccaaacaccgcatattctcactcataggtgggaattgaacaatgagatcacatggacacaggaaggggaatatcacactctggggactgttgtggggtggggggaggggggagggatagcatctggagatatacctaatgctagatgacggttagtgggttcagcgcaccagcatggcacatgtatatatatgtaactaacctgcacaatgtgcacatgtaccctaaaacttaaagtataattaaaaaaaaaaaaaaaagaaatgcagcctcaggaaaaaaaaaaaagactttattttgtgctacagtaacatttacgatgatttttgaataacagaacaaaggagggtgaaaaaatggatatgtattttataatgtattttaatattttacaaattctctgggcttgttttctttaagaagcttacaacatgagtctattattcttagtattattattgtttaggtagctctttggaggcttgtgatttgtagactcatccatttctcttttatataatttaggcattagattaattattttcaactggagccccatggattatcaaagatgagagatagtcattttagaatgatcatagctagttctaatattgcagctgcaagtcaactctcacaaacatgaaagcatgtgacctattttaagtctttctcctagtcgatttcaacttttagtttccattattatcaccttgagaaccgttctgtacttaatttctctgtaatttacatgtcttttgcaatcttctgttccctttatcaaattctcttattctttcctttttgtaagttgtatgttactattccctgctttaacttttcagatgttaatttagtatgtcaggctaaactcttcttcagaccttgagctgaaactctgggagaagagcagaagttttggaatcttccagcagaaggtaatttagctctgctcagatagacccttctccagtgactgctgggaatatccccaggttggaaataccagctcattgcttgctgagaatttaatcagttaagagcacacctttttcgagctgtggaagggtgattaatctaccctgtgctgatagctaggctgctaagatgacccaaagcaaagccagacagaacctctagatttcctgtagctgctttcagtggggggtgctgtgtcttatatagagatcgttgttaaacattcatcttgactttcattgtcattactattttgtacttcctctttggcaaatttcctcagcttcctctttgagtcatgttgatattggtgtttggattctttatgcaatttctcctttagtcaactggatttttttcctactgttaattcattttgttcaccagtggtctatttttgcctttcttatccaataaagtatgtccatctttagtttacccacagaaacattttaggaaatgaaatcgacaatattccccagttttaggaatcaggctgatctgttgctttgtcaacagattttgagagatgcttgagagaaatgtgaggttaaaattgtctctgcagacttgagctgtgcatatgcttattcttagccagacgccagttaattaaagatgattcagaaaagaagaataaacccacagcagaaagtacaacgtttttggcaaactttacagttatggaaaatataaatacttagaaatttaggagaagcaagaatatattttaaaaattagtattaaatataaatgcaaatggctgggcacagtggctcatgtctgtaatcccaggactttgggaggccgaggtgggaggatcacttgaggtcaggcgtttcagagcaacctggccaacatggcaaaaccccgtctctaccaaaaaaaaatacaaaaattagccggctgtggtggcacgtctgtgtagttccagctactcgggaggctgaggtgggagagtcacttgaacatgggaggtggaggttgcagtgagtggagatcgtgtcactctactccagcctgggtgacagagcaagactgtctcaaaaaatataaataaataaataaatgcaagcagttctgggtatttatttaaaaactcagttgttcccatgggagcaactggacattacttattaaataatcagaataaagggagggtagtaattgaaatggaaatatgaagttgcctttggatcacgtaacagaataagcctggatgtagtatcattttccccttagatcaaattgttgtatttaatgggttgaactcacttgagtttttgggggtgggggaaagctctagagcccaagtactgaaatcttgtttggacatttaaatacatcgtggttatgagaatagttgaaaatatggagctgacttgattaccagtctccaaaaataagaggctggtaatttatttccttattattgtaaaaaagaatcattaaagaacttgtgaggaaggggtagaaaggagaatgattatgatctgaacataaggctgttcatatttctgattcctgttctcattttttcattattaaaccaccaaaatctcctacagacaaatgtctgtaagtcaaaatgtttttggcacatgaattacagtttcagtttggaataagattgtttgaggcaatgagaaagatctggttgaattaatacttggagtatttggataagccaaataccaagttcatcagttaaaaataaagctgtgatttttgatgaaactggacttcaatgcatgctgtgatgttgtgatgtcaggcagagcttcccagtaagcctggggacctgcaagagatggcacggggtgagggtgtgaacgcgtgtgtgtgctaccttactcatatgtgccaatttggaaagttcagcaaattcactattagggcttactcctttcctctgctcactgccttcgcatcagcacctcgatcacaggaaatcttttccaagaaaagatcagaaatccttacgttcatttttttctctccctttctccctccattatcccttatgatatgagttacatgggtgcatcttattaaaaagggttcatggtcttataaaatgtgacatcggccgggcacagtggctcacgcctgtaatcccaacactttgggaggccaaggtgggcagatcacgaggtcaggagtttgagaccagcctgtcccaacatggtgaaaccctgtctctactaaaaatgcaaaaattatccgggcatggtggtgcgcacctgtaatcccagctactcaggaggctgaggcagtacaatcgcttgaacccgggaggcagaggttgcagtaaaccgagatcgcaccattgcactccagcctgggtgacagagcgagactccgtctcaaaaaaaaaaaaaaaaagtgacacctcattttcagtttgctgagttatttggagaagttgtactttactaaaaggactcagaatatcagagtgtagcatcctagtggaagacacagtatccttgaaattcagagaaatagggagaatgtgagtcatgatgtgatgtatattcagagaaagagtcaaataactaaacgttcaagtatttccctggcctagttttctttggttcttttacttaatgtccttagccttggccagagagaaaaactctaaatatatttattccacccttgttaaaaatttatgtgcctgattttggtcagattactctaaaatattttcttactataatccaggtatggtatatgtctgcatgatttatgaaatggtctttctatactttattcctcccatgatcctcaaaagatgagctagttggtgagcacgaaggtgagtgtctggcttgagtccagcaaactctctggcttcagccaccaccgaactggaaagagataatgtgctttgccaaaggtggcaaggatggcaagcagaggccctggtgctcctacctctcagctcagatctctctccactgcaccacactggctttcccagaagtaaaggtctcagataaccagcttgagtcatttttatagccatgtagaatggcttgcttctgatgaatttatgtaccctgttgtgcctttacaagatcatctgaagtctagaggaattcatggcgtttgtgcctctgtgctccatgaatgtccgatgggtgccatgtgacattatcagctgtgaggatagaagggtctaaggaaagaaaaaggccaagtagataaacatgaatttcctaaagctgtttccacagtcattttgttatccacttgccctctgacagaaggtgaggggactgagcagtcattggcaaggttgttaatgtcaacagatttgtctgtgtgtgtgtgtgtgtgtgtgtgtgtgtgtgttattttatttatttatttatttatttatttatttatttatttagagacaaagtcttgctttgtcacccaggctggagtgcagtggtgcgatcatagctcactgtagcctcagcctcctgcactcaaggaatactcccacctcagcctctcgagtagctgggaccacagacacatgccaccatacttggctaatttttgtattattattattattattttggtagagacgggttttcaccatattgtccaggctggtcttgaactcccgcgctcaagtgatctgcccatcttggcctcccaaagtgcatgggttacagacgtgatccaccatacctggctgtgtgagtgtgttttcattaaaggcccaagtggcgcctgtgctaagatagctgtcattttgctctttccatcatttgtagtttgctttagtaataatctctcattcttaaactgagttttacaaaacaagaaacaggggatgggatagggaatgtagggagagggtagagagaaggctgtgcagagataaaattgaatttctcatctcctgtagctttttgctaaagtggaacttcagcataaagcctcatatacacaggcaggaagatgagcggacaactgtctgcagggagcaggccgtttgcacagttagcttcctagctgaaaaacacatccctcacttagtgtaaaaaatgacatgtatctcctgtatatttgtctctattttatatttctaatatctaatatatctctattatctattatatttctgtctcatctaatatattctgtatatttctgtctctattactctattatagagtgaaaaacaacatgtgtctcctgtatatttctgtctctattatcaatgttatctggcactttataaaacctttgtgttttttagattctctaaatatctaaaaataaaaaaggctagtaaaagatttttgaatgatagagcagttaaagaatatgggatagtagacctggaaggattttagaaataatttagtccaacttcctcattttgcaactgagaagatggagccccagatgaaagtgacttgttcaaagtcttgcagaaagttagtggggtagtggtgtaattctctaagtgtcgttaatattctttttctgcagaggtccagataagaacaggaacagagtttgttcttcaaaggctcatctttggggcaggtgtgttgttgtcaccttggatgtgcctctaatgctgagagccaaggctttgcctccagtgccaggtgctaaggtggttatggctgggttactggtggtacgaggaactggtaataaactaccaaagattgtatggaatgagaggtggtttctttaggatataatattaaaggggtctatccaggcctgcctgacattgtgtcccagagtaaggggtcaaatggaacttcccaccttgtcttcctacccttgcacctgtcccacaccatggtaggttttatatggggacctagcctgtatgcccaggtaatatctacacccttcaaggtagcctgtgctcgactactgcttgggcctagaggtatgcccactgcactgcgtccacccttgggagcagtgctctgagaagaggccctggcaggatgcagcctcctggctcttcaggaaggcacttctcgttttggctgcctgaaccagctttgggtggcatgtacctttggcgccccatttacccttcccctcaaggataaggaggatcaggacagagccctctaatgtggcagagagcaaggaaggcgttcttttgcctggatctaaagcaagtattggaagtattactaagagagggtgtggatttaagtatgttctaaggctcttgagataggcctccctaagggacaggatctggagaaaccaagtaaatagttgttagttgctgttagattggggcatgggattctctaaccaaatagatgcccaatgcagctgtcttagtccattttgttactacagactgagtaatttataaagagaggagatttatttcttacacttctggaggcttggaagtccaaggttgaggggcttgcatctggcaaggaccttcttactgcatcatcccatggcaggaagcagaagggcaagagagagagagagggaaagagagagtgagagtgagagcatgtgtgctagagagagcgctggagagagagagacagagagagaaagagagagacagagaaggggaggggaccaacctcacccttttgtcaggaacccactcccccagtaatgatatcaattcattcatgagggcagattcctggtaacctaatcatttcttaaaggtcccgcctctcgacacggttgccttgggaattaagtttccgacacgtgaattctggaggacacattgacattatagcaatagctataggtttttgagaaagatgagcaagatgctctaagcacaatcactctgaatttttggagccatcttctgatcttggcagcatgttggcagtgagaactcatctggcacttgctagaggcaggctcccagatgagaccactggtgccctttgcccaggcctacacctcacttccagacttctagctcttgccattctaagaggcaggaatgagtgaccctccacattgtcttccttcccatgccagcctgtattagtttgctgccataataaagtagcaccacagccacctggcttaaatacagaaattcatcatgtccagaagtccaagaatcagccgggcgcagtggctcatgcctgtaatcccagcactctggaaggctgaggtgggtggatcacttgaggtcaggagtttgagaccagtctggataatatggtgaaaccccatttctactaaaaataccaaaaaaattagctgggtgtgctggcgcaggcctgtaattgagctacttgggaggctgaggcaggagaatcgcttgaacccagaaggtggaggttgcagtgagctgagatcacaccactgcactccagcctgggtgacagagtgagactccatctcagaaaaaacaaaaaaagtccaagaatcaaggtgtcagcagggttgcttccttctggggactgttagggaaggatctgtatctctccttggcttgtagatgatcattttctccctgtgtctttttatatcatcttccctctatgcatgtccccgaatccacatttccccttttataaggacaccagtcatgtcggagtatggttgatcttaactcaaagtacatttgcaacaaccctatttccaactgcagtcacattctgaggtatggaggtcaggacatcaacatacgaattttgtggagaacacaattcaacacgtaatatagcccatgaaaggaaaccctctaacagagataaaccagagagtaagacttctgagagatgcaatttaaaaagaagagaggacatctcatgagttgactccaagtttttaacctctttctctgtcatgcaaagcttcaccccagccatacagtcaagagcagctgcagcctttaatccctgatcctgagggggcagtggtgggaaatggggataaagatggagccgctccccatcctgtggtttgagtgtgcctctagcagaggtgaggatgcttccaccccaccccaccccaccccacttatttcttagaagacaagaatgtgagtattgttcattaatcaaatactgattaggtacacactgtgtaccaaacacttcaagtacttctccaaaaatccttgcccacatgaaattctttttctagtagtaaaaggcagaaataaataacaaacataataaattagtaagttacatgtaggttagtagaaaatgaacatgacctggggattggggtggaagacgagtggatgtgaaatttacagctgtcaatggagtagtcaggccagcctcactgagagggtcagaggtgagcaaagacttgcaggtgggagggggttggcccattatgtgtgctggggcagaaggtcaaggcagtggaccctgcaccagccacagcagatttgaggagctgtcaggaggcctctgtggccagggtggagtaagcaaagaagggagctgtaggagaggaggtaagagacgagatgagagatgggccatataggcccttgcagacttggctcgactcaggtgtgatggagtgagtagtggcattttatttgacatgcttgtgaaggctcaccctggctacatctcaagaacagactgtagaggagtgagggtgaacgcagaagaactgttcagagacgattgcagcatttcagaggagaggtgcccgtggcttggagcagagtggtagaagtagagacagttctttggtcagatcagttatctttagaatagtttctcactcccaagtcattgaaccaaaattgcctggctgtctcctcctgtataaatgtctcattctggcccttgaccaagtcttggcttgtattatctagattagtgactgttattgacttaaattccatttgcccttctaattacggctgaaaagcaatctgtcccccaagattgaatttttattactcatatttttgacatcagtggttgcattctgtttgtgatattgcaagagtattgaagggagccctttttcatttctaatgaatcatttttaaataataattttaaaatcataatccgtaatcatttttaaaaatgatttttaaaaatccataataatcatttttaaaaatcaaagacattctcacataacattttcttagagccaccattcataatacttagctcctaaactatagacaagaatggtaatgttctacacacgtttattgtagcagcccacagtctcccagttgggcagattgaaaagaaaccgtcagtctgaagaaaacaaaagagtgccgtgttttctgttggacctgctgctgctgctacatggagtagcaactctttttacctggatcgtgaagcaccagtgtgcggtgccctaataatacctataactcatcataccacaagaaatggaaaattccacatgcatgagtctgctagggctgtcgtaataaagtaccatggacagggtggcttagacaacagaaatttattttctcacaattctgaaggctgaatgtctaagatcaaggtgtcagcagggttggtttcttctgaggctcctctccttggcttgcagacagctgtcttctcttttgtcttcagatgatcttccctccacatgtgtctgtctccgcatctcttcttttcttttcttttcttttttttttcaagatacagtctccctctgtcgcccaggctggagtgcagtggcatgatatcggctcactgcaagctctgcctcccgggttcacgccattctcctgcctcagcctcccaagtagctgggactacaggcgcctgccaccacgctcggctaattttttgtatttttagtagagacggggtttcaccgtgttagccaggatggtctccatctcctgaccttgtgatctgcccacctcggcctcccaaagtgctgggattacaggcgtgagccaccgcgcctggccttccacatctctccttataatgataccagtcatattggattggggttcaccctaatgactttattttaaatttattacctattgaaaagccctatctccaaacatcgtcacattcttaggtactggggattcggactccaacctgtgaattttgggggacacaactcaaccggtgacaggcacctttgcatttaattttcttttgccacagccaccccccaggctcatctgctgctgatgtgcgttctgtgcagcacattcatgtcagtagtctcaatttttgtaaggtttcatttgttgagggtgaaatttggtcatatgattggaacaccagtttgtgagtaaagaataatgtgtatttacaaatcatgatattgattatattgtacattgaacaaaattctgaaatagaattccaaaaatttgtctggatgacagttcattttaaataggtacacagcttctgggagcggtagttagtattgttcaacagttaggagagcagatagttagactgcctgggttactgtttaatctcccataattaccagctggttacccctgggaaagttacttaaacctctcttagtctctttgatgaaattttcttgtcttacaatgtagataattagagtttctacttcatagagttataataagaatttaaaatgctcatctacatagagaatttgggagagtgtctggtacatagtaagtgttcaataaatgttggattctattatttccagggcagccactttgaatgaagatactcatttgggtaaattaggtctggtgtgtttctgaaaatgtgttcgctaatttgtttggacaaattgtgtgtttctagggtaaggcataatttcatctgagaggataattcttgtttgttatgaataatatgcaagttttttaaaaagtggggattggtttcactcattaaagtacacggaactcctgcttgtcagcattgaactggtcttattttctggtttttggtttgtagtcctgctcctggaattacggtttggggaccacagtgtgatggcagcagcaacatgtgtgtatgtttgggggactaatgtgacatctttgtaccctaggccagacaccccacttcaataaaagcagattccctgttatctttattatgttttatagtgctgtgtaaactttggtttgagagaattcttctactataaatagcctgaaacccactagcatagtatatagattcctcatatcgtctgctcccccaacaattgcttttattctgtatataccccagggatacaactaatgttaatagtagcctgagcaaaacgtaattgggaaggcaaatctgttgcaaaaaggaatatagcataaattaattataaatcaaattaaatataaaacaatgcatttaattatctgcatcactgcccccttcctctaacatggatatctgagaggagactgattttctttctgggatagggccagatctcagcccagacaagtgaactgtgtcaacccctggaaagatggtgcttgacctccttttttgtgatatgttgggcattagctaaaggcactgctgttttggtcagctaaaatttcagtatcagtaagaggatctactacctatctgaattgttaatgcatgggctagtctttgtgtgtgattgggaacacctacttataatatactattaaatgctcatataggttcaatgatgtgttgaaccatttattaaaaatgtatttgttgaatggactctaacgagcccagcaagggaaagtgcatttctgcccaaggaaggttttcagtttgggcagcaggcattagccacccaaagctggtgctgctgttagaatcagaggaagaaccagtacgggtccatgttggatgccctctgtccttctcaccaccctaagtggtttcatctgccccaatctccatgtctgtgtgacactctgacttatgttctctcaaaagatccaatccctggccagccagagtctagcattctccaggcaggattccaaacattgttttccactgttcccactgagtacacgaatttttgtcagatggcagctcctgaattctgaagagtctggtgtcacatgccccacctctgtcaaacctcacttcttccatttgggctgatctcagctggactggaaaaccctcctctgttgaaagtaggtctaaagtggtaatgactgattagtacggacctgcaccagttcccaggtatttacaattgaaacgagtttgcttatactcagaagtgacaaattggtggatgtgataacatcaaaatatagttcttacagttgaagaacaaacaaacaaaaatcagcaaattggcagcttagctccgatacttggcaacctctggtatgagatttcctgacaccctgcacactttcccttcccctcccaacacataccccagaaaccttgacctttccttttgcaggtcatcatttaatcaagtaatcactcctcttctagcatctattacattttctggcatttctagcagcagtaagtggttgagggcaggaaccatgtcttcatgctctaagttcctagcttgctgggtgcccagtagatagatatttgaagaatgagtgagttcatgaatgcatgaaagagtggaaaactctagaatggatgttctcactgctgtgagcatccacgtaatccagtcctgttcttccctcccctttctgacctctatcactctgcggggcccatggaccccatgacgggcttacactgctgaagaggcctgtctggttttgtcacattcagactttcttcctccaaatcatctctcatagtgcagcccaattatttttctaaaaaacaaaaacacttctttcatattgctctcttgctagaaaacggaatgatttctcattgcttgagggataaaactcaaaactccttagtctggcatttaatactgactagagcttgcccttgatatttctttaaaaatattttaattgtaaatatttcaaacatatttaaaaatacaacactcatttatccactactaggattaaacaaatagtagaatttaccccatatttactttgattttctttccctgactaaataaatttattttattttattttttggagatggagtcagggtttcaccatgttggccacgctgctcgcgaactcctgacttcaggtgatccaccccccaaggcctcccaaagtgctggaattacaggcgtgagccaccacgcccggcccctaactaactaaataagcaaacattatagatacagataggccccaccccatccttctctctcttttcctaccagaaatagtcatttccctgtttatctttcacaactcacctgtgagaaccatttggtccagttagatttatcttcttgctagaatttcattctctttttttttttccctttgaggcccagttcacttttcacctcttctggtaagctttcccaccaatctcctagttctaaattgctgcacaagttattttctccattgctcaaggcagacaatattctgcctggtgacagcttttatgtagcagttttctcctagtattgattttctattccccttatagtaattttttcctcttgctttatattatagcgaattgcatgcctgtgtttcttctctactaggtaacaaccttcagaataagatctgactcttaattgcattgattcattcattctacaggtattgactgagggcttactaacaagctccaggaattctttaagcactggggatgcaggagtggacacaacagacagtcgctgccttcatggaacttaagttccagtgggagagagagaaattacatgaataaataaatatgtcaagatgaaaagtgctatggagaaaagagaagcaggagaaggctaagggggtgctatctcagacatactttaaatatgtgtctctcctttatgctctatgtcaatgccgaatgcagagggctctgggtacatatttgctgaattgcattgtctacccaaatagatactatttgattccctgctggtgagacactactcagtgtagaccttccttctgggaaggttgttataggaatgcagattttaatcctttgctgccaggagcacaccttggctgttcttcccgttatcagtagatgtacactctgggcatgataaaattgtaatactagctttagtaaggcataataagggaggaaaggtctgtttcctagcaccatatttattccgtagtcaaatggagccaatttggcatcatctttcctcctgcacttcttcgtccatcagaccagtggaaggttcactttttgcagtgttcctaactgtagtggtattgaattgtggttaccaagaagaccaatctcctctttttaattcttccagcctccaggaaagaataaaatccctcaacttgtcacttaaagaaatcactactaaggtaagtacctttatattcccattttccaaagaagcctatgaagttttcgtttgacttgattttacatctagatcttaggatacctggcttctgcaaaaaaagatgtagactttgtcaagccattttgcaggcccaatgatgagttaaaagagccaggagagagtgcttctgtcatagtggaggtcttgacttgtggacaccccagaaatggactggtttggcctttgctacaaaaggagctgtcaatttagggactgaaaaaggactgccactatgcatattgaaagcctttgcttaaagatgcattcggggcttggtgcggtggctcacgcctgtaatcccagcactttgggaggccgaggtgggtggatcacctgaggtcagaagtttgagaccagcctgaccaacattgtgaaaccccgtctctcctgaaaatacaaaaattagctgggtgtggtggagggtgcctgtaatcccagctactcaggaggctgaggtaggagaattgctttaacccaggtggttgaggttgcagtgagccgagattgcaccattgcattccagcctgggagacagagcgagactctatctcaaagaaaaaaaaaatgctttcaggatggtagtaatttgagaaattaattacttttcttcccaggagggcaatgtctggtttcctcacaaatagaacagttggtgactgtttttttgttctttaaagcttttcagttggcttgacaatcattttgcctactttatccatcgtttatactgccatagcaagaccttggtttgtgtacagacagaatacgtcttcactattccctgagagcacagtcaattaaatagtcaatgtcctcattagttaggataaccacagtttacaaaacaaaagcccttctcatatgtatttatacctggccaagttattgacagactgagaaacaggatcaattactctgtgaattatgactaaatgttgtggcagagaactgggtatgaatcattcattatttgcagttggtctgggaacgaggggtggttgtaccatggtcgaaatgtaaaaaggacagcttgctgagcagagagcaacgcagctgagagcctgttggcctggaaggactctcttccggtctctgtgcccagagaaagaaagtcttggaccctagatcaggaaacacgccaagggatcaccgcagctaagccagaatcagggatgtgatgttggcaaaaatgtctggagttactctgtgcattttctccatttctgtatctaatttatttctgaaaacaacacccagtgattttgctaaaggtcacagagccgcaggtttgatgggtaattataacttgtgtacaaagagagcttcctgttaggaacaagtggtgcccgtaagacagcatcggagccagggacccagaaatgcttgacttctgctctgctcacccaaaggttctttcacccaggctggagtgtaatggcatgatcatagctcactcagccttgatctcccgggctcaggtaatcctcctgcctcagcctcccaagtagctgggactacagacacatgctaccttgcccagctaaatttgtttgattttcagtagagaccaggtcttgctaggttgcccaggctggtcttgaacttctgagctcaagcgatcctcctgcctcagtgtgtcaaaattgggattgcaggcaagagccaccgcacctggcctctcttacattttctgctgtttatcaggtgcgtcctgatttctatgtagaattaaaagatgggaggactgtcttgggtctgagtttattgactatcttcagaacatactgtatgggtaatatgaatgcatctgtacaccaacgttgaggatacaggtgtgcctattatataatgcagatggtgcttatatgggtgtgtgtatgacactgtatattgtggatacacacatatactgatacgcacccaatattaggatttgctgaaaatttccaactactattaaagatcttagattttcccaaatatcaaaaatgggttgttttgtttgcatacagtcctactccatttgagttgctataacaaagtactgtagacgaggtggcttataaacaacagaaatttaattcccatcactttgaagcctggaagtctgggattagggttccagcatggctaagttctggtgagaggccctcttacaggctgcagacggttgacttcttgttgtattcctgcatggaagaaagagggcaaggcggggtctctggggcttctttataagggtactaatccccttcatgggggccccaccttcatgacctgatcacctcccaaaggccccacctcctaatgccatcaccttgggagttagactttcaacctatgaattctggggggaaaaaaacatctccaaccattgcacataccttctctaatacatttataaaactttataattacttcgcttttccataaaattaaggaactcacatctttgattttaaaatgtaaacataaaagccccatttgataatgagttccttggtgtccaattttatttgtaaataaaaaggatacacaggttttccggggatgtgtatgtgtgtgtgcagaggtggataggtgtgtgtgcacagacacgaatgtgtgtgtgtgttgtgggcaggggcctatattagtccacagagaattaaaacaaaactgtccagtcacacaaaacacctttctctgtactttaaactagattgaccagtgaccatgagctgagaccaaggtctcagcttgacatagctttctttctctagtgtgttagacacaccacacacacacacacacacacatacacacacacccctacctgatattctttagactcctgtctcagaaagaaatgaaaccttccttgcactcattacatttcttaaactcttatgggttacccaaaccaaaagtaattaagggataaatgagatggaagaaacagttggaaataaatgggatatctggagattggtagatattagattacatccagcagagcctgaaagaatgaacattgcaatttaataagaagattcagaaaggttgtttagtattaatattgacagcttgaaagatagatttgctcaacaaaggagaaactgactcaattatgattaacagatactgttcactaaaatcagaaatattggacatagactggatgagacataagaattatggctggtattacagagttaatggaaatgccctcagacctcagatgacattattaaatagataggatgggatgtgccagtcatctggtttgagccaaactaagacttggtgctgggggaagggatatcttccttttaactctgaaaagtctcaagactgttgaaagggtctcggaattaattactttggacatgcggatgcccaacatcaccagtgcatgctttggtttagaggctaccaaactgtcgtcttcatccagagaatgatttttataaaaaagatgttggaaaattacagccactgaatagaacatatggaagtccatgagagaaagagtggagtattttaggcaggatggatgaggtctgctttgactccaaaaataatctcaattcaaactgatataagaaaacatttaaagttgatggtgtcccacaaaccttagattcttctgggaaattaaatttttctaggtagctcattaatctgagtctagataacattggcatatgaaaagtcttgagactgttgaaagggttcaaaaaaggaaaaaaatgtgatgttttagcctccaacaaaataaaagataacctaaagacatttggaaaaagaaattaagatttaagatttttgctatttttgaaaaaccaaagaaaaaaactgtaggatgtgtttggaatgtcatgggaaaatacatgataaaactctcaaacctcactgagagttacttgtctatttttcaaatctgacttgccagcaagtatctatctgccttcaaagtttccctaaacagtgtctattaatactagtaattaaatttagcttgcagctttgaccttcatctcaatggccatatctttattcactgcgtactatgtgccaggcacagagcaaaatccctgctcacatagagctcgtatcccggcagagagacaatgtggaaacaaaggaatagaattacatggtgtatcatctgagaagaagctgtggaagaacatcaagcggagggagggccaagggaggttgctattttgggtgggtaatcagtaaggcctttcctcccaggcagcgactgagcagtctggaagggtatgagtgagccaaaccacctgggactacaaaagtgatgcagacaggaggattcggcagaggcctggagaaggcaggaggcaggagtgatgcaattatgttaccttgtggttgctctctgttagctcctatcagttttgtaattggatgtggggtgatgatgggcatatgcttggaatatgccattgctcactttatttttgttcttcttcctacatttccctccctctttcccttctctttccttcccttcctttcccttcccttccccttccccttccctccttcccttcctcccttcctcccttcttcccttcctccctttctccctctcttctttgtctttctttttccattgcttgctttttgaacattgtcttccaattacttttcatcaccccttttaattacttacaaacccagaaatctctgacctggctgttccactgccttctgatttttagctgaataaatgatgattcctggtcatttctctccccctaggtgtgtatgagtgagaaattctgcagcaccctgaggaagaaagttaacgatattgaaacccaactaccagccttgcttgaagccaaaatgcatgccatatcaggtaactggcagtgtaggagacgttgaagctatccaactaaaataatgacagctaccagcacatcgtgttttgtcctcgatgaacattccactgttattatgtcattctcagacatctgaaagcttttctgggaagtttcactaatatgcacataatatagcacaaggtgtttaagtgagtaccgtatttgggatttctagttcctgtttcttgaagagtttagagactaaatgtactctgtgtgccatatgattctagcagatgtgtatgtagcattgtgtatctgtaaatactgaatgaggattattgggtgtgatcagaccctttctatagagggaaggatggtaacatgagacaaattaatgtcctcagtttgaaaatctagtcatagaaacttggcgaatcctcaaaggattatgctccctcttactctggcagttattaaggaattgatttttccattaattagtagcttgaagtcaagagtctctgaaaacagtatcttatcctatcattagtgctttcaaacactcctctggatttgttattttattttcacaattgctatattaggtagatgggagagagaccgtgatccgaatggactgatggggaggttgaggctgcgggatgtgtcctttggttaaggtcactcaattagctaagcagtggcagatctggggctaaagtccaggccctctctcggtgtattatatatggatttttaacccagttatgtaatgacagcttcaaaaagttctctgagttttataggttgaatggacccagagctcatcagcttcaaaagaatcataaaaatttaacaaaaagttataataattacatgtatgtgttttaaatggtattttaagaaggaatacaataattggcagcttctgctcctcagatcattaaacaactaatgttggcagctaaagagcaatttggtccctggtgcagtcacgcgtattatttacaaccagtagaacatggcagcgcaaatgtggggcttggctcttaacagcttcacatgccatttacttgaaattatgggcccatttgctgagagaaaaaaaaagaagattgaacacagtcttgcttctgagttagggtttttgcctttcttaatcaatatatctttcccaggaataccggtggatgagtctgtgttaagcccaagggaagaaatgtataattcaggcagcagagatagcctcactccaatgtgaacaatctctcttcagactccagggaaaatgcccaagatggtatattgcgtatggcgcaggtttcctgttttagctctttggtcagctgagaaaattggtgaggcctgatctgctgaaggatgacctgaattaaccctcctggtaactgaccttttgacctcactattttctggttgctctgtatgctctttggtggaccggcctttcagtcaatgggctgtccccataggtgatactagtgttaaggtggtcaacatttgtttgcaactcctgcatataatgctatttctgttttctcctgtttcaataccttcagaatgggcaaaccctcactccattaggtaagattcttaaaagccctattgaatggaaaggatcttggtttttttttttttttgagtcagagtctcgttcagtcgcccaggctagagtgcaatggcgcgatctcggctcactgcaagctctgcctcctgggttcataccattttcctgcctcagcctcccaagtagctgggactacaggcacccgccaccacgcccggctaattttttgtatttttagtagagacggggtttcactgtgttagccaggatggtctcaatctcctgaccttgtgatctgccctgaatggagaggatcttaagggaggtccttaagattcttagggggtcttttgtctctcttcaagtttctatgattcgcttagatttatagactgattgatatggtttggctctgtgtccctacccaaatctcatctcaaattgtaatccccacattcaagggagggacctggtgggaggtgtttggatcatgagggcggtttcccccatgctgttttcgtgatagtgagtgagttatcatgagatctgatggtttaacaagtgtttggtagttcttcctgcattcattcttcttgccaccttgtgaagaaggtgccttgctttccccttgccttccgccatgattgtaagtttcttgaggccttcctagccatggggaactgtgagtcaattaaatctattttctttaaaaattacccagtctcaggtggtatctttatagtagtgtgagaaaggactaatacatccatcctgactttgatctatggcctgaggtcctttcttaatttgagaactatttgccatttgcagagagtaggaataacaaattagtttcattttcaaacctggccagatctagctcctttacatgtaacagtttattctttaattcatctctcttctcttgcatttcatcacaggcattgacaggaggtcagtgggcacttctgtattctgcctggaaatctccttggatgtctaactacaattattagggactcttttttatattgcctcagttggtaactgagtgacttttttgccactacaaggatctttttttttctagtttctgatatatttttcttacttttttctatccttcacggaggcccatgaggcttctgcctactaccaagtcccaaaaccaatgcctcgattttaggattttgttacaatagtatcccatatccagataccaaaatctattttcattatctactgctgcctaataaaaaataagtcactttaagacgtagtgacttaaaatattaccagttatttattttgcccatggaaatacaatttgggcagggcttggcagggacagctagggtggctcaactggggtgggagaatccacacccaagacggtgcatacatatggtctggctgttgagtgctctctatgtgggcctctctataggcagcttggcttccttacaacatggctgctgggttccaagagcaagtgtcccaagagaaaggaaatggaaatttcttattcttaaggtctgaattcagacactggtatgcatctctattaatgtgtaataagtggctcctcaaacttcatagcttgaaacaacaaacctttatctctcacagtctctgagagacaggagtccagagtgacttagctgggtggctctgactcagggtctcataaggtcgctgttaagacacactttggagctgcagtcgtctaaaggcttggctggggctgaaagatctgcttccaaactcatgcatgtgttgttaacagacggcttcagttccttgccacaagagctgtgccctaggacctcttgcaacatagcagctgatttcctcagagccagtgatctgagggagagagaccaaataagacagaagccacagatgccaggcgcggtggctcacgcctataatcccagcactttgggaggccgaggtgggtggatcacgaggtcaggagatcaagaccatcctggctaacatggtgaaaccccgtctctactaaaaatacaaaaaattagctaggcgtcatggcgggcgcctgtagtcccatctactcgggaggcggaggcaggagaatggcatgaaccgggaggcggagcttgcggtgagcccatatcgcgccactacactccagcctgggtgacagagcaagactccgtctcaaaaaaaaaaaaaaaaaaaaaaaaaaaagccacagtgtcttgttaggacttagccttcaaagtcacacagcatcacttctgcttagtgactagaagcaagtcactaagttcagttcagcccacaggcaaggggaaggaaacaggttttaccccaaaggaggagtattaaagaatttggtgggcatatttttataaccactgcagtgttacttccattgtgttttattggtccagcattcctggtgtgctgattcaagggaagggccactataacaagtctcaatgagaggtgtgtcaaagagtttcagtgccatgctctaaaaagtgccacagtatttattgagacagaaggattttgagaactgaagacctggacagagagcttttcagtcagaggaaatggcctgttccatttatttactgaaaagaaaaatatcatggagcatctaggaagtgtcagatctggttctaggtactgaggatgcagtagagaacaggacaagatcccccttcctttttttttttttttgaggcaaggtgttgctctgttacccaggctggagtgcagaggtaagatcatagttgactgcagccttgaattcctaggctcaagccatccttagccttagcctctggagtcacgggattataggcatgagctcctggctcaatgtctcttcttttttgatagctgtgttctcccattggccacagtggaatggagctagatatgcctgggctgaatatggaggaaaagctcagctatttcttcaggaggaagagtagtctagattggcccaggtataggattagtattgtggtagctcttcagagttggttaggaccaggatacacagagctctgaattgtaggctaaggataagagcattttagggagccattaccatgttttagcggagtagtgacatgattaaaaccagactttaggaagcgtaatccggccatgttgtacacagagggatggatgtggcaacaccttgggagtcatggaattaactaggatgttagaaatgaaaaaaggaagaaaagtaggctagtataggaaatctactacagataggtaattattgatttttggaagaaccatgatgatattaatatatccagttgagtgtggtgtaatacacattaagaaaagtaatttagagagcccattgtttctctcccttttcactgtacacaccttaagtgtgttttagtcacctctttttttccattctctatttctgtttcaattttcctgttcagcagaggatagtttggtttaaagccgatagcaaaagtggattctgttgttgctgtccttcctagacatatcagtccgttctcacactgctgtaaagaaatacctgaggctgggtaatttataaagaaaggaggtttaattggcttatgattctgcaaattgtacaggaagcatggcagcatctgcttggcttctggagaggcctcaggaaacttacaatcatggcggaaggtgaaggggaaaccagcacttcacacggccagagcaggaggaggggggtgggggaggtgccacgcacttttaagtagccggaccttgtgataactcactatggcaacagcatcaccaagagggatggtgctaaatcattaatgagaaactgcccctatgatccaatcaccttccactggtgctaaatcattaatgagaaactgcccctatgatccaatcaccttccactggtgctaaatcattaatgagaaactgcccctatgatccaatcaccttccaccgggccccacctccagcactgaggattacattgcaacatgagacttggatggggacacagatccaaaccatatcactagtgaaggaaagtacagccctgagctctatgcatactgacgtagaggaagaaactcaccagggcagagagatttctcagtttttgagtgcaggggccatacagttagtagagagaaacttgggctttggaatctgagaagtgtgtgttcaagtgcagctttatcatgacttggctggatgatcttgggcaagttgtttaaccttttcaggtcttgtttcttcatctgtaaaatggagctaataataatattgcccatcacattaggttgttgtaagaattaagtgaggtagtaaattagaataatgtggtacatcagtatattaatacatgagataataaatatatgaacgtgacgtggctttccacagagtgaatacatgcttagctagtgattgttagccatgcatctgagttgggggagacccagccagtgggtgactctctgatcaggtgtcactcagtgctacaggttcccggccagtgtacctgtagtaaaagggcagcggtggcatccatacctcttaatccaaggcagctttggcctcagtgcctgtgcagtctcctgactggccaactaggctgggccacttgtcaatggggtggattcgtttttttgtttggttttcagctccgagttcaaaagcctgggagacctgctggcttctctcccagagctgggccacatattgttaacctgggccctggaggtctgatcagtgtcctggctggatccagtgcagtaagagaagccaaggagaagacagtcttccaaggcctgaagcaggtctgacctaactgcccaatgtaggaggtttgccctgggacaaactgaggtcctgcagggttcgagggtgaaaggcctcttctcccaggaggcagccccagacccaccttgctgaactggctgcctggaaaggaagtgagagcgaagatctcaaaaaagagcagctctttaacctctgtgctgctctcactgaacgctcccgccctctgcccaggacttgatggctttggccctggccctggggcagagcgaagggaaagcgtcagtgccctctagggccgagagtgtggcactacagcaagtgtgtggtgggtgcggctgacttgtgctctgtggctactacccatccccatcagaaacctgggcctgtttccttctctggaatggtgctgggactttccaaaccacggacctgtagtgatgagagttggtgtcttgagtccgcgtccaccgtctgcatgccatgcctgccttcccactgctgggggccctcaaccctcctccagttcccgtgtctaagacttagcaacaagcatccttcctgtgtgttggactgcgggtctgcaccattgtgagacacggtcctatattgggccctacctctatcggtgctcgttgacctgactggtatcacagtcctcatctggaacggggccagccaagctctggccactcccttgtcctgggacgaaggctcagcccctgaggcccggcgagtagtcaaggctggctctctgatgcctggctgctctgatgctggcatcctgcatgcacttccagctccagccttgtcctgctcaaattacccctcattattgatctggtccatctgttgagtcaccctccaatttttttcttccactttgtttaatgcctggcactcaaaagacagccagtagaagtatttgtttttcaaaaaatggaccctcattcattggttgctgatccctagaatctgttgttttcatacctccttcacttgttaagattttcatctcctgccctgacttcagtgggtacgtctggttttaagccccggtcctccttctcataggatccatcctctgtcaggtgattggagctggctgatgttccagcttctggatgctggaagccagcagcagcagctgcctgggtgacagcctcactgtgtgttggcaggcttctcactcaccttttttaatcaattggacctgaaaatcttgaagctaaacaaacacagccctgctattttggcacaagatgaaggccagttttaagtggtctataaaagctgtgaaaaaaacttttaaaagagaattatatccagggcacccaagctgcttccagatgccagaggcagccctgcatttaataatatgcttgctggaatccctttaaaatggtagatgttggccatctttttcttttttctttgcattcccaatggaaggacttccaatgtatggccctggtattattccctgtatgttttagagaagctctaaattcctgtagccgtcaaacttgggtttttcactcagactgcatgttaggatcatctggggaaatttaaaaatactggtacccaggcagcaccaaattccttcggtcagaatctctagggatttttcctgaatataggaaccttcataaacagtttccaggtggttttaatgtcctgtgagggctggaaccaccgtaccagtgagaggagagctggcctgccctgctcactgctggcagatggactcttgagtcacatctttgcacacccagaagctccaggcccaccgtgtaccatggctaagtagctgcaactgcaacctggccttggcctggaagcacatcttgtaggatcactgatgttactctcccctggccttccccttgtcctggaagatgtgcctaaggctgagagacttcattgtttaattcatctagctgtctgttctgagagcccccagctaaactgaggttccagtcccagaacagctagcaaaccgccctaaggggaaatgaaggggagatggacatggtatttactgcgtgcctttcataggatgctgcttttacctggtagatggcccaatgcctagttgtctgacctgtgaccaggggctcctcgcctgggaaacttgtttatatgtctttgtggctcttgcctttcctgtgttcagtttatgcccccctgcccattgctctggcgctgggagccaaaccttgtgctctcttgggcatcccaggtaaaacctggcctggggcatcccctggtcttcagatggaaggtgcaaaggcaatatacaccacagtaggaaacaaattcaaaaagtgtaatttacggatcctgggcagggagggcacagagagtcgggagggcagtcctttgtccctgggccactccagataggaatgaagcatcatgcagagagagagaaacaaggcacatggcaactggcagtgtgtatagggagtagggtctgggccactgtaagttttcaggcaaatgtgtgaatggcctgtttaaaggaagcaatggggaagcagggagcccagtctgctagtcaggggagatgtctctcagtttttatctctcgccactggcttgagccattgggtgtggtttccttctaatgcctgggcagctgtgtcattcccgttacagtcaccacatgattctaattgccttagaatttataggaaccagttggcagcccaacaagtgggctcctctggccagtgagggagcctggtgagggaatcttcccaggacaggcagagacatctgcctggttcttagattggccatctttggtctcacctcagtttggatatattttttttttatctcacctgcccccttgttatctgcttccaagaagcaaacagctcaaataattatttattttaaaataacataagaggatgtctctgatactccaaaagccttttttttttgaaaaaaaaaaaaaaaggatggttctatccaatttggcatttcatttatagagaataaaaactatctatacccaaaatgtattcattgcacacaattgtattttaatggcagctggaaatcttctctcctaactgatgcttttggggaaaataagaacatttggacaataaactagattttctagataaacacaaaatgggtgaatttcacacatccaataatgaaagtagttttttccttaaattagaaacaaggatttaaatttccgtcttcttctgaatgaatatttggcacccaaccaagaaatatatatcattttaaattttcttgaggaaatatccttttcttgcataattaatttaaaggaaattaaattgaccatgtcaattgtcaaacaaggaaaagtaagaattttgcttatttgttattaattttatttacaatagtatttaaaggtaactttgtaaaataacccctaatgatataatctaaaataaaatagattgtatttaaatcacttttttattatataccacgaaaaactactgaatgattaaaacattcttaagtgggttcttaacattgtatggaactggaaagagcagttcagatcacagaggcatgggcactgtgttctaagtggtcactgcactgattcagaacagcaggggctggctctgtactgggtgggtgggtgctcaaggccagacctacacagtgctcctgtgtctgcagctgcagggaagcaggagaaacagtgacgatggtccaggagaggccacctgacatatggcagaaaaacaaaattcagggtacagacagtggctgggagcatcaactcaatcgctttctttctttactattttccctctttctaaaaaagtctgtgatttagatcagtggctgcaggagggagacaagagacccagtaaagatgttttcaaagatgatgcctatctggtgtgaaaagaaatgaagacctacccaaagagaataagcacaagctattatgcagagcttgctacagcaagggagtcagacaccatcatttgcaatttggcagagactcaaaggtgggcagacgagtgggagagctttatagtggaaaaaggcgaaggcttcaggtgtgccctgattggaggttatcaatgcggggaagctggaggcggctcactagaagcgaacatcctgtgtgcttggtcaggggaccatatttggctttctctggtgggtcctaagttggaatcggggacaaaaattagggaagccatcagttattaatccagtcctgaacattttgagtcaattgttacagaagttattatttagcttcctggatagttactagagagcaatttggcttccagcaggtctgatttagagcaggccagcttccggggttgctttttgtgggtaagggtattgttttctgggaaagttgctgcaccttgtggatcagagttccatcttttgctatggcctggctgttgtccgattgtatatttagtcagtcaccaggcaccacattttctcaagctgttggaaagttctgtgtgtccagtgttatcttccccttgtattctatgaaatatatggctgtctgaaatgtttgatgtgcaaagccagccatggggctctgctcacagcaaatgcttttggctatctcaggaagtcatggtgactggaagaaatgcacaaccctgacagaaaatggcaaattctagctgaagggacctccagggagaagggggttggggaggggagcagttggctggggcttcttggccgcctccattgccctttggttcagccagcccaggctcacagcagatatccttgacctcgccaagggaaggctctgaaagacaaaggtagatcttgatcttgcttaactgtgcacttgagcttgcagttccttgaaagatctggtgtcacgcaagacaaattatacagcagtctactatttctggagtttgatcattctcagcactggctttatttctttttttccactaaagaagtatagttcaaatgtggataggtgaaagtagataatcttaggaggatcgttacaaactgaaatgtccatgagttcaggaaagtgccatgtgtgtgaggggtaccccaggtgagaggcctgaggattgggcaggtgaaagggaccatgtgggcacaggattcatccccctcaccatgtgctttctcactttagtgatgatttctacccaggtgttgactaagtcacttattgacatgagatcagaagaaacaagttcaagttcagcaatctcgcatgggatcttagaactctgaaactctgtgaccttcacaaggttacctctgggtctagattttttaactggaaatcaaggacaatcattaagagactccccttcctggattgttgggaagattaaatgatacaatccaagtaatgagagcattgtagtctctaaaattggattctcaaataatgacctcaggtgaaggaagaactgttcaaaatgccccaggtgctatgaagtacagagggcaggtattttttttaagggatggggtcttgctctgttgctcaggctacagtgcagtggtatgatcatgactcactgccacctcaagctcctgggctcaagtgatcttctcacctcagcctcccaagtagctaggactaaaggtgcataccaccatgcctggctaattttttaatttttttgtagagatgggggtcttgctatgttgcccaggctggtctccaactcctcaagcaaccttcccatcttggcttgccaaagtgctgggcttacaggtatgagccaccacacctggctgatatttgaattcagagatgctgaggataagtaatgttggaacagagtgggtaaagtcagcttcagcataaattgtgtttatttaatttaaacacaatttaaattttgtgttttggctatctcaggaagtcatggtgactggaagaaatgcacaaccctgacagaaaatggcaaattctagctgaattttaaattgtgttatttgcggaataaaatatgtggacaagtgctttaaaaaacctatgagaatacccaggtttcattcccttgttgaagagcaggcgggcacaggcatattgggatgccataggtggcatattcttctccacacacatcctccttggcatttagaaagggcctgtgaaagttatgaagattcaggtcacagatctctgatgggactttcttcaggtatcagcattgactttccaaattttcatcactgagctcctgaccaatttcagcagtcagagaggtctgcatcaagcaaggtcttggtctaagcctcatgggattagatctgaggtcaaaatgcctataaagtattgatcaagggcattgtagcattttctcatggcttgggtcttgatatgaatggtctctttgggaattcacactcactctgctcttttaaaatgttcacttttatcactgtgcattttcccaagccttatccctcaggatcaaagaaagggcctaggctttaattaatgatctctcctatgttttaccaagggcactggtctctcgagcttgcagtgggttgcaagggattagagggtgtatttgcagcaaaacttctgtaccggcactcgctctgtatatatagtctcttccaatctgcttttagagatcttttctttctgactgtttgcaggaggacatggcacgctgtggcatattctgcctgatgtctctggaggcatagttggtgcccatcccactttttattaactctcttggttgaaaacacagcccagaagacatgttgggacttcataagcacagcctaaggaggaacattggaaggtacaacattgtacatgtggccaccctgccccaacgcagtcacacctctgtgctggtcctcctgcgagctccccagagcatggggtcccttgaggttctttgtggcatgcggtagggggctcgatcctcagcttccttgacttggccattgttcaggatggaaattaccgatccgggaaaagttttatttgaggttactgtttacagcttgaagctcatggaagtgcagtctgctctcctgtggactttgtgggtttttcctaaatgggtccaacccatcagcttggcatttggggcactattgttttgaagcaacttccttgtgagtttagtctcacctcctaccccttgcccattgctctctaacctgggttcctgtttcttcttttgggactcttatattcttccctcctgaaatctgcctcagtctctccttctggaataatctctcttctcctctgacctctcctagtatttgttttttctttggaaggcaccttatcccctttattttatggtaacttcctggagagcaggagcagtacttgttctcttttgtgcttgtcatgttgcttaaaacacatgagtgttttaagcagtgagagacaaacacatgagtctcaatagggtctttatccaatcatggcattggaaactatggacttcagtgacagatgttatgtgctaggtttcagaatgcctttaaggtgggaaaacattttgtatcattttcaacatttgtatcagtttgaaatctgcctgctaagtaacaataaaaaagttagcaacataatttatgtttaaaaggaagtgttctggggtgatgttcgagttggaaacttgccctatgctttactgcattgtgatcttcagcaagatattttagttctccagatttccgctttcccagctgtaaaaggagacaacaatatgaatttcagtgaacataaaaagcacccattattttatacattgcaaagaaagaaaaattgctgtcaattaagcagtaacagtgctttctatggtttagaatttttatcttatacttaactgatatagctcttttagatgtatttaggcttttgaaaaatcacatatcactcattaaaaaggaaaataaattggttaaggttttccttggcatcttcttcttcattctgagtcttccgaaacacatttggactcaatgttgtcgaggtttgtgtttccccacacgtcatcatcctgtgaaccattgaagttgatgggaggcaactttttctcccccaagaataaagagttttctgtaggattgtctgccaaactgctaacacctttcttcaagttttgaatgctggtgctttcccagtcttacaaatccacatcaacacaagattttcaggcaacagccagtacgcagatggtcctaaaatagtttgtacattgaaacaccagggggttgcagatggtcagccaggccagggaaaataatccagttataaccactgcatcctgaccacttcctggctgatggtgattgtaggacacatccctgtttcagagatgttaaaatgtaaaataataataataataataataataataataataataataatataagatataacctgtttcctaaagttgtgatgacatttaaaggtgagaaagtttgtagctattattgtgattatggttactataaattctgagaaaacacagtggggttttctaattaacactaactaatttatgggacactcattaatgttatatatttatttattgttcaatgttcatgcttaaaaatttcttaatttttcctctttttaattgaggtatggtttatattcagtggaatgcacaggtcttaagtgtttacagttcttgaattttgacacctgtgttacgaacagccctaccaagagatagaacagtctcatcactcaagaaacaacaccctatcttgtcccagtcatcatcgtccctcctctgttctgatatcttctaccatggattaattttggctgttctagaacttaatggaatcatgtggcactactcttttgcatcttttctaaagacatgtacatgttggctgggcgcggtggctcacgcctgtaatcccagcactttggaaggctgaggtgggtggatcacgaggtcaggagtttgagaacagtctggccaacatggtgaaaccccggctctactaaaaaatacaaaaattaactgggcgtggtggtgggcacttgtaatcctagctacttgggaggctgaggcaggagaatagtttcaaactggaaggtggaggttgcagtgagctgagatcgtaccactgcactccagcctgggcaacaagaacaaaactctgtctcaaaaaaaaaaaaaagaaagaaagaaaaagacacatacatgttgctgcatgtatgacgagtttgtttctttttattgctgagtagtctttcattgcatagctatagtattatttttgcatcttcctgctgatggatatttaggttgcttccagtatggggctggctctcaggcataagacactgtgaccatttatttgagtgcaaatatttttgatgacatgttttcatttcttttgtgtaaatgcctggaagtagaattgttggattaaagggtaggtatacattgaactttatgagaaactggcagaacttttcttgaagggaccattttacatgcgtgagagttccagttgctccatacccttgtgaatgttgacatttttagttgagttaatttgaaacatttgagtgggcttgtagtggaatatttatggttttaatttttcttttcttaatgattaatgatgtcaaatgttttttcatatgcttattagccatttgtgcgtctactttgtaaaatgcctgttaagtcatttgaccatttttcaatggcaccatttgtgttttaattgtcaagttgtagtattcaattccttgtcagttaaacataatgcaatgattttctccaagtctgtgacttgtcgtctcattttttagttgtgtcttttgatgagaagtttttaattttgataaagcccatttatcctttttaaaatagtgttttctgtatcttatctgaagttcttgcctactccaaagtcaatcaaatattcattttttttttgtagaagctttatagttttaacttttacatgtaggcctgtgatccacctttaattaaatttttgtgtggtttgaggtatgaatcaaggttaatattttttccatgtagatagctagttgttccagcaccatttattgaaaatactttcttttcctcattgacttgctttggcactttggttggctgtatatgtgttaatccactcctggactgtttattctattccatcgatctgtttgtctatgtatattcaatgccatattaccttgatttatagtggctttagcattagtcttgaaaccaagactcactttttaaggattgctttggtcatcctcctcctcctcttccttcttcttctttcttcctattcttcttcattcttcttcgtcttctccttccttccctccctccctctttcacctcctcctcctccttcttcttctttctccctctccttctttgaggtggggacttgctatgttgcccagacaagagtgtagtgcctgttcaaaagtgcaatcatagtgcactacagcctcaaactcatgggctcattcttctagattttatttgtttagatatgaagtctcactctgttgctcaagctggagtgcagtggcaggatctcagctcgctgcaacctacacctcctgggtttaagtgattctcctgcctcagcctcttgagtagctgggattacaggtgcttaccactgtgccagattaatttttatatttttagtagagatagggtttcgccatgttggccaggctggtcttgaacacctgacctcaagggacccaccacctcggcctcccaaaatgctgggattacaggtgtgagccaccatgcccagctcactcttagacgttttagaataagcacataaatttctacaaaagaacctcataacattttgattggaattatattaaatcaatgaatcaatgtggggaaaattgaaatcttaccaatattgaacttccagtgtatgtatacagtgtatcttttaaattatttgtctttaatttgtctcagcagtttttgaaaaatagttttcactgtagagctcttgcacatatttaaagaaagtatccctcagtattatgagatttaaaatattttgtaaattgtattttttaaaaaatcatcttctagttttttgttatttagacataagattgatgtttgtacattgaccttgtatcctgcaatcttgctacatttaatttatcatatatttttctcagtgctttacagaatttcttgtttattcttgtaactacctatgagtcaggtgttattgcaattatattttataagaaatttgccccagatgtgctaattttcttgctccaggtcacacagtttgagtaacaggggaggaatttaatttaggtcaactctgattatatggcccagtccccttccacactgctataatatgtcatctctttgacatttgtatattattggaatggagtgacacattgtggtttctctggattccactgggacatttttgggtcatcatactttacgggagatggcttcaccaatggaactcctaaaatggacataacaagaataaggtgataaaaaagacggtgatttttccagtttaaggagagcaatatttttccaggttctttccccagaggactgctaaggaaattgtacataatctcaaagtgcagtttctttgcccatgctgtgaatgtacattagctgctgctagatcttccatgtgtgtggatgctgtaaagcttgttttcccttcttctctcccacaacgtgctgtaggaaaccatttctggacggctaaagacctcaccgaggagattagatcattaacatcagagagagaagggctggagggactcctcagcaagctgttggtgttgagttccaggaatgtcaaaaagctgggaagtgttaaagaagattacaacagactgagaagagaagtggagcaccaggagactgcctatggtaggtagtgcacaactgttccccggcaagatattgatgatatttgttgtgttttgtggccaggcagaatgttctgtgccttatgtgaacgtcactgtgaagagcgtcatggagcacatggcccttttccttggggacatttttggcaggtgccttggcaaaccgaatggaattacttgtcagcttttgttttcatattcacatgtgacatcttttctttttctgttccctgtctcaacctgtgtttgctaatagccttgttattatttagagcagtctctcccttggcaaggtcttgagcattttctttgtgtgacaattatcttccttttgtcccttggctccgtctccttgtctgcacaatcatagactaaatcaggctgatctgagaaaattgagggaagaccataaagtggctcttctatgtgtggacttttctgagagcttctttccccaggaaggatgatgtagaagatgtgaatgccgccttagccaaagtgtctgcttgtcagaggagttcaagtgttcctgtgttctttccttttccagtcgttaggagtaactgagcttactctgagatttgcacccagagggatggtctcagaagacgctggttcagtgcaaattgagatggtaaaaacttatttcttaaaaaatggttcctaaataaatgtcatttactaaaacaaatgaaagaaatatatatatgaataaatggctatattttacaaagtatgcttatttaagaagaaataagaaaaaacggggctgataggaaccagatttgaaatagggcttttgtaaatactccgtaaattgaagtaaatgaagagtagtatttataagctagattgagaaatataaaatcagctagctgaagttaagtgcatcaatttgggatgaataaattttcttttaaaatgtctatcaatttgtgtagagagaggtttcttcatagagatattagaatcaaagagtatgttcagtagttattctgtcttctttgtaatgaatacccttaagttggcttaacagctcagtacttatctttttttcttttcattcttaaaggtcaagccttgtttttgccgtatatgtaactagagacagtacgtttgaggctaaataactgtagtactagggaatgacaacacgctcacccaagacaccgcagcctggtttactctgtcatgataggaatgaggattgtacatttgaaataggtttctgctattgattttttaaatgtataaacgatggaaactacggaatttctcatgttttcaccacatagttttttgtcataaaatgaagaatatattatatccaagaatgaagaggaagtgaacaaatttgagcaaatttagtccagcaatattttcatttgaatagttgagcccctgaaagccattaatatctctttttaaaaaaagaaccatgcagtatttttgaatctcatcatcgtcacttcactaagtattttcacaatgatgaataaaacataaacaaatggaatgagagattgttaccatggatgattctaaattgcagatggctcattactgttgtgaagcctctctttatgtttttacacttggattttgctggatcagccaccctttccctatacattgatttacacgtgcttaattttttttaaccaatttgaggtgagttggctttaggtgaaccaaattaataatctagggttgagagtgtgggaaacaaataaataatgaattcctgaatacattgaagcttttatttattaaaatgtgataaaactggggcaaagtccatattcagctttttttgtgttttgagggttaaaaattcagagggagctctgtgttcaagtttaaatgtagagaaagtacaaaggagagtgtacttatgcacatacacatatgcatgcatgtaccatgactctttttagccttagagaatgaaaccatttaagaaatgagcaatatgtagtattcttaaaaaaagattttgatttccaacaatagttgtggaatgcagcgttcaggggaaaaaggcaactcatggatgatcaagccaccctgcttgtcaggaacccagactcttctatcttgttcttctctgccccacaacatgtgccattcagtccaacctggctgacccagccacatgcatgtccaagtccagtcagaaaaaaaacaaagaaggaagagagctcatctatcccctttaagtacgcttttagaaatctgcacacatctctgctacggccacatccctgtgaccttaaccttgttatatggtaacagctacttgcaagaggggctgggagctgtccttaccctgggcagcaatgtgccccactaaagtgatgaattctgtttccatagcaaaaggggagatttgcagtcttagggaacaattagcagtgtctctcgtacagagaccttttaatgatgtgaagtgtatctctaatgatgcacctgagatgaatttgctgcatgcatcacttaaaatatcattgtatcttgtgtctctggctagattgtgagtccaccgaggtcagaacattgttcttaggtttcactgtactgctttggtgtccagcatgatgtcttttaaaatagtaaatatactataccatcaatatttgttcatttactggggccagatgttaaaatgacacatgaatgagtcctctcttcctgcattttagattgcagatctggaccttgaatcttctgcttctttattcattttccaaattaatgagggtagtgataagtttgtctttcttggaaggtgcttgagttgtctgagttggatattcagtttggagtgtcagtaatagaacaatacggtgatagaaaaggaactgaaatatgccaaggtactcaagggcaaagggagacagacctcatcaccgaatccattggcttttgttgccaagacacaatctctataaagagatgataaagaagtgtgctttaactcctgtcagctgttcttgagacttcaggataacacatttgaattcggagcaatgttaagtgcagtgaaatagaaggaaaagctaaatctatcttccaagccttgaatatttatggaaattaactataaacatttaattattgtggattccaatgtgtgtgtttatttaaagaagggtggaatgaaaaaaatcagcaacttttacagtttgctacatctgcttttttttttttttttgagacagagttttgctcttgtcacccaggctggagtgtaatggtgcgatctctgctcactgcaacctccgtctcccaggttcaagcgattctcctgcctcagcctcccaggtagctgggattataggccagctaatttttatatttttttagtagtgacggggtttcaccatgttggccaggctggtctcaaactcctgacctcaggtgatccacctgcttaggcctcccaaagtgctggaattacaagcgtgagccaccgcgcccggcctacaactgcttttcaagttaaaaggacagccctcagatttacgcagcagtttttcaccatcccttgtgtataaattggtaatctgtattgtactttattaatattgttgatttcgcactgtaactcagctataaaggaaaccgacgtcaaggggagagatttaatcacagaataatcaggactagaattttaaataggacatcattagcatgttaatgaattttcccaccttatgccagctgcctgagtagaaaagatactgcagatgtagctcaaaaatctggctggttccctggcccagtgagctgtcaggaatctgtgtagggtgatccataagctaagtgaagggattctaagtgagaataccaagcagcaagattttgtttttctgagaacgatggctaactgtgcccagcctaaactcatttgtctttcggtgagtaagaggggaatgggaggcagagaaggggcagttgaagggcaatgaggttggagtagaggcacctttccaattatggtttgggattaggaccttttgctttagatagaaaagttgtaagttcgcaatgacaagatcctgccctaattcttggcacagtctcacaatttttgagcttgaaatagctaatgaaaggaagcatgagtgtcttagtccatctgcgttgctatagaggaatacctgaggctgggtcatttataaagaaaagggaattctttggctcacagttttgcaggctgtctaagaagcatagtgccaacatctgcttctggtgagggcctcaggctgcttccactcatggcagaagatgaaggggagctggcctaggcagatcactggtgagagaggaagcaaaaagagagagaagggacatgacacactctttttaacaaccagctctcccagaaactaatagagtgagaactcactcattgatgaccaagctattcttgagggatctgcccccagacccagacacctcccattaggctctaccttcaacattgggggtcaaatttcaacataaggtttggaggtcaaagaaaagaaactatagcagtgacagattatactgagatatcggtttaactctgaagttcccagatgcagctacttgcagaatttcacttcacacctattaagaaaagtcttttagtttagaaatcctgtgagttacaagttctgcatatataggcagtaattcttttttccatatatgtcagatatatgtagaagaaactgatgaaaaagtagaacaaaagaataaaatctatgggtctcttttattggcagggagagggaggaaatggagagccgggacaatacatacaacaaagataaaaacaataaaattagcaaacaacaataaaatttaaaaacaaagacagaagaaaatgccaatgtcaagtgttaattatttggttgagaatatgatgtgataatgaacttcctagaagtcacagcaaagaagacagttgaagcatcatccttcttcctcaaaagcaccttgaaaagcacagagctttttgggaattcagagtgatgctaaattcttcaagacacttctcttgaaagcatagtggaaagtcctcctgaacagatttataacacatgcagaaagctcttttacttgtattattattttttacaactttttattttaggttcaggaatacatgtgcaggttctttatataggtaaattgcatgtcatcggggtttggtgtccagaatattttatcacccaggtgataagcatgttatccgatggttgtgaccaactacctctaggaaaaaaacatgttggggatcccttcaaagcaggagggactgtgcacaggagagactgaaaccacatacacattttagatatgtaggtatggacagtttttcccacaaaaagatccagtttttcagcagatttttaaaggggtcattctaagagtcctcaaattttaagaaacattaagatattaaactgtcgaggtgaattagggcttgggctagtgaagtttaaatacggcatcttccaatttctgacattatttcaagatgtaacttagcacctaaaaagtggctggagaacatatcctgtacactcaccaaatgtcacttctttcctctgagctttggctacgacctatgtataagaaaacttagctctccgggccagaacggtgatagtgctcttgataacagagggccaagccgtctgctttggaaccagatgagtgttgcggtgctatgtggcaagaaatgtagatgtttatatgggaaatagatatgtgtctgcctttccaaattcgaaatctttggtcatttagatttaaaaaaaaatgtcaaataggatcttttggaagaaataaaaaaaattcaaaatcttttccctcaggtttttctgataggctgaggttttaaatctctaatcatttatctttgatttgccttattgattacattatcactttatcaggaccctgactaaatctgtttgtgtttttaatttctctccattttttcctttccagttacatccttgcatcactattagtgtgattatttcccttcagccatttttgcctgtgaatttctaagcttgaaatttgcagctaactttctccctcctttattaagtcgctgtgataattcttttgggaggcatcgccatacagtggaaaaagcctggattaggatgtagggggtgtcagtttaatctcagtcctgcccttccctaatcatctgcatagcacctgatatatatagcatcagaatgtgaggctcaatgagtgaatagtcttcagcaactcactgaattttatctgagtctcagttgcttcatatgtaatactgtagaaccagatcttgaagttgcatttctatccatccatccatccatccatccatccatccatccacccatccatccatcctttccacaagcatttattgagtacttacgatatgctaggcgctgtggcaggccctcatggtccagagatgaattagatagtccctgtggctactgaggtcccttttaactctagccccttgtatgtgaatttccacaattcaatttatactttgttcatttattttcttgctctcagctacttttgatctccttttcccacttttatccatatatatttttaaaagtccctactattgttacatcttttttcacttgtctctctacttgtttctatactcccttaaaatacgtaagtcacttaccccctgggtggaaatacaatgatgttttcaattatatttcataccaaattgcaacaggcagttttttttaacatgctaattcatttagagcagaaacttgactctatgtaatagggtgggtacatgtgtctcttaaatatctgccagattttctgctttgtagattattcttactaatcagtgcgtattagagtctctttgtacatttcatatggactctgggctttgataatgttggtagacacatgtactcacacacgctcatataatgtcctgaagattaagctaagagtgatggtaagtggaacttcatgatcttaaagaagagcctgtttgccatgttttgggtgaggggattattttttgcatggggaccctatcatgtattgcagaacatttcacatccctggtcattgcctgcatccaactcttcttcccacccccatttttcaatgcccccaggtaggagtggtaccaccctcagttaactgcataacttcagcctaatgctttatgttttagtatcattcctatgatttgaaaatatgttgtcatgatcattagaacttgcctggaattaataaaaccaaattctattattcacattatctttcatatagatccttagaggtttaaatataagttctttgcagatttcttcctccattgctctttactgtgtatattcagtatgtatttcttgggcacagatttctgtatgcacagatgagctacagctattgtggatttaatgttttctttgaagaaaaggaatgatcccttgtacgaagtcaccctctttttagtaacaaagacttatctctttctttttgtttctcaagcacttgagaactaagcactgtgctaagacttgacatactttagtcatctcatcctctggaccactgtggtactggctccactggaatctctgttttaccgatgaagaagctgaggtttaggaaggatcctgtcacagagccttcagggggcaaggccaccatctgaatccctcttacctgccattttacctttgacgttgctttatgttctttatgaatttgattcctaacgtcagtctctctatccatcccgcaacctcatcaccctacctaaataccacactcatagattcataattacaaaacaaaagtctacaaaaagtcatctattgatgatgttgaacatcctgaaaagacgggtatttttttttcatttttgaagttttcaagcaccctccctatattttgtgcctgagatgatgatccactatctgccatgttgctatagcagatggataatttaactcagtagtaggaggttctataggttatcaccctatgaaactcatatcttttgtattaaaacctcaattctttattttcgaagggtgactaggagaaacttggcatactaccataaatcagagagaagttgaactatagcaatttaattggatacatattcattgacttcaaaccagttttttgtatattttcaaataactgttgctagttctgcttcctgttctaaaatgctgaaatggcaatcttttcctttgtattcctataagtaaatgcattggttattagattgatacattactcagttcctggtaaagaagtagttagaagccctgtttgcttttaagaatttactaatttgtcatccttttgattacaaggaattcaatttgcaacatgtgatgtcaatctttctaggcttcttttgagtgagttttgaactttagttaaataaaacaactttttttttttgagacagagtctcagtctattgccaaggctggagtgcagtggcacgatcttggctcactgcaacctccacctcccgggttcaggcaattctttgcctcagcctcccgaatagctgggattacaggcgcccgccaccatgcctggctaatttttgtatttttagtagagacggggtttcaccatcctggccaggctggtcttgaactcctgacctcatgatccacctgcctcggccccctaaagggctgggattacaggcatgagccactgcgcccagcataaataaaaaaaatttaaactattatataatttaggattttcaggaatgaaggttgattctttataaaccaaatttgattttgtgaggttttgcagaatttaattttacttggctaaatatgactcattatatggtcacagttttttcagtgattaatttggtaagaaatattttgttttccttcttggcattatcatgagttatggcttcctgtacacattcctgccattttagctgtgtactttttctttgaagctgccatatgttaacaacccaagagagatggtatttactggagagatcatcacttgttgctaatttgatttttcagattctctgagctcttataaaagagagagagcatgctgatgaatgttttcctgccctgactgctttgaggagctagtgtttgctgccctgggcccttagtcctgttatgttttggacttggggatggccactgtgtctaatccactttccattgaggcttttctgtaactggggagggctggatcactgtaggggtggacaaccctgagtgaatgcactgcaatttaatatttatggccggtacagaaaccatcaagaattgcttaaggatttactgacttggcatcatcaaaaatttatgaggcaggtatgctcatattccacaagcctgcatagtcatagaatgtcgttttatttttcttttgacattatgctttctggagtcttaataactcattaacaactgatgacacactttgctttttggtttaattataaccaaattttatttgccaaaatgatgtttaatttttggtgtattaacccattatgaatatctctcttttcctatgtttactatgactgctttacatttccagtctccccaaatctgatattttccttccccaagaaagaaccaaatacaattatattacgattgcatggtctgtctggtttggacagggtgactgaaatcttgggcttctttttaactctgaattggatccagcattctactttgcttcgtatgtaccaatcttgttgggtgagacatatacattggaatttggcaagtgtttgtatacccttcacccaactccactgttttcagagactgagtaacagtagtggctggatgccaacttcatgtctgccctgagaaggtcaccaaacacggacattcccccgtggtctggaatcctgcaaatctgtcagcctttggaagtgaagtgattctcccctaaagattatagagaaattctctgaagtcaaagctgatgaaatgtctggagttactctaggataaaattttaatttatttcaaaaaatacctttagcataaaataaaatttttgaaatgaatgaaaaatgtttatcatgcaacttctataacagagcccctggttgcatttttttgcattatcttctgtgcttgcagtacaggaaagctttttacacacttgtactgagaaagaggatgcaattttacatcctctgtctgtccttaaccttataggacaatagtgagagcatggcaccagttaatcctcgtaactgtagtttgagacaaatttatcattcccaatctaccaatgtgtgaaactgaggctcagtgaattaacagagtggctcaagtttctgtatatgggaagtaaagaactggaatgagactcatctgtctcacttcagagccatactcttcattatacacttctgtgtccctggttgcattataatattccaatttattattttttatgtacataacagtccaaggatcaatatactgtgacttacttaactacctccttattctgaggtgtttaatgattatttcatgaattttttctgaagataaagtgccaagattgggattaatgacccaaagaatgcagtcatttttatggcttcatacatactgcagattgatttgcaggttatagcaatttaattgatactaccaatccatcctttctaataataagcattattttttaaaagattattagtataataacagagtggtatttaattcatgccttgtttttgcatatctttgactaatacattcaacttgtttttttgtgcctttataagttttttttgagacagggtctcactctgtcacctaggctggagtgcagtggcattatctcggctcactgcaacctccacctcctgggctcaagcaatcctcccatctcagtcttccgagtagctggaagtacaggcatgtgccaccatggcctggcttggtagagacgggattatgccatgttgcctagagtggtctcgaactcctgggctcaagtgatccacctgccgtggcttccaaaagtgttgggattacagagtgagccaccatgcccggcctactttttttcattgtgtgtttcactcacgtccgtgtgaagagacaccaaacaggctttgtgtgagcaacgaggctgtttatttcacctgggtgcaggcaggctgagtctgaaaagagagtcagcgaagggagataggggtggggctgttttataagatttgggtaggtaaaggaaaattacagtcaaaggggggttgttctctggcgggcaggagtgggggggtcacaaggtgctcagtgggggagcttttgagccaggatgagccaggagaaggaatttcaccagataatgtcatctgttaaggcaggaacaggccattttcacttcttttgtggtggaatgtcatcagttaaggcaggaactggccatctggatgtgtacgtgcaggtcacaggggatatgatagtttagcttgggctcagaggcctgacattcctgtcttcttatattaataagaaaaataaaatgaaatggtggtaaagtgttgggatggtgaaaagttttggaggtggtatggagagataatgggcgatgtttctcagggctgcttcgagcgggattagggcggcatgggaacctagagtgggagatattaagctgaaggaagattttgtggtaaagggtgatattgtgcggttgttagaagaaacatttgtcatttagaattattggtgatggcctggatatggttttgtatgaattgaaaaactaaatggaataagagaaggagaaaaacaggtattaaaggtctaagaattgggaggacctaggacatctaattagagagtgcctaaggagattcagcatagtcctgccagcaaagattatttatttacttcaaaagttaagagcggcagtttggggatagcaccaggagatatcagctgtgatggcttggaaaaacagtgtaaaccggcagcgtaaacaagagcagggcatgtatgagtagttgagaatggtgaataggagtataactagacagaagatagtagggatgacaagttttttggggcacagtccaagttggtctggtgtctggaatgagactggggcctaataaaaaggagcgtccatacaggagctcaaatgggctgtaccctgtagcattccgaggacaggcctgaattctgagaagggaaagtggtaaaagtattgtccagtcctttttaagttggtggctgagcttggtgaggtgtgtttttaaaagaccattagtctgttctacctttcctgaagacggaggaccgtaagggatataaaggtttcactgaatactaagagcctgaaaaactgcttggctgatttgactaataaaggctcgtctgttatcagactgtattgaggtgggaaggctaaactgaggaattatgtctgacagaagggaagaaatgactgcagtggccttctcggaccctgtaggaaaggcctctacccatccagtgaaatggctacccaggctaagaggtattttaattttctgacttggggcatgtgagtaaagtcaatttgccagtcctgggcaggggcaaatccccgggcttgatgtgtagggaagggaggaggcctgaacaatccccaaggggtagtagaatagcagatggaacactgagaagtgatttcctggaggatagatttccaggatggaaaggaaatgagagattctaagagacagggtagcagcttgtaacctatgtggaagaggttatgaaatgacaacagaatagaatgggactgtgaggctgcaaggagatattttccttggtctaagaaccatttgccttgtgtgggaagagactgataggtggaagtttcagcaggggagtaggtgggaatgactgatgtgaaggagaaaaactggccgtgagggacagaagttggagagctagctgcttgtctagccaccttatcagcataagcgttgcctagagcaatgggatctgacgccttttgatggcctttgcagtgaatgactccagcttcctttggaagtaaagccgccttgagcagagtttttattagaggcattaatgatggaggacccttgcgtagtgaggaaacctctttcagcccatgtgaccacatggtggtgtatgatatggaaggcatatttagagtcagtataaatattgacgtgtcgtccttttgcaagagtgagggcttgagttaaggcaactagttcggctttctgagaggtagtgggggggggtgggcagagtggtagccttgatgatagatgtggaagctactatagcatagcctgcctttgctggtgagtggcgattaggcctggtggaactgccatcaataaaccaaatgtgatcagggtgaggaacaggaaagaaggaaatatggggaaatggggtgaatgttaggtggatcagagagatacagtcatgagggtcaggtgtggtatccagaataatgtgggaggctggattgaagtccatgccaggaacagtggtaattgtgggacactcaacaaagagtgagcacagctgaaggagccagggagcagaaagtatatgcctcaggtgtgaggaagaaaatagattttggaagttatgagaactgtagagagtgagttgagcatagtttgtgattttgagggcctctaaaagtattaaagcagcggcagccgctgcacgcagacatgagggctaggctaaaacagtaaggtcaagttgtttggacagaaaggctacagggtgcggtcctggctcttgtgtaagaattctgacctcactaaccatgcctaggaaggaaaggagttgttgttttgtaagggattgaggtttgggagattagtcagacatgatcagcagggagagcatgtgtgtttttatgagaattatgccgagataggtaacagatgaggatgaaatttggacttgactgaagtaatgggggctgtctgtgaagccctgtggcagtacagcccaggtaatttgctgagcctaatgggtgtcagggtcagtctaagtgaaagcgaagagaggctgggatgaagggtgcaaagggatagtaaagaaagcatgtttgagatccagaacagaataatgggctgtggagggaggtattgaggataggagagtatatgggtttggcaccacagggtggataggcaaaacaatttcattgataaggcgcagatcctgaactaacctgtaaggcttgtctggttctaggacaggtaaaatgggggaattataaggagagtttataggctttaaaaggccatgctgtaacaggtgagtgataacaggctttaatcattttaaagagtgctgtgggatgggatattggcattgagcaggctaagggtgattaggttttaatgagatggtaaggggtgcatgatcggtcaccaaggagggagtagaggtatcttatacttgtgggttaaggtggggggatacaagaggaggacgcaaaggaggctttggattgggaagaagggcggcaatgagattcagctgtagtccaggaatagtcagggaagcagataatttagttaaagtgtctcagcctaataagggaactggacaggtggggacaattaaaaaggagtgcttaaaagagtattgtcaaagttggcaccagagttggggagttttaagaggtttagaagcctggccgtcaatatctacaacagttatggaggcaagggaaacaggcccttgaaaagaaggtaatgtggagtgggtagcctccatattgattaagaaggggaaggacttaccctccactgtgagagttacccaaatctcggcatccatgatggtctagggggcttccaaggcgatttggcagtgtcagtcttcagctgctaagctgagaagatctgggaaggagtcagtcagagagccttgggccagagttccaggggctctgggagtggctgccaggtgagttgaacagtccgattttcagtggagtcccgcacagatgagacgcggcttaggaggaatcctgggctgcgggcattccttggcctggtggccagatttctggcacttgtagcaagctcctgggggaggcaggcctggaggaactcctggtcactgcggtttaggcatttggaagttcttgtgtgctggagatgtggctggggtttgtctcacagtggaggcaaggaattgcaactcagaaatatgttgctacttggctgcctctactctattattgtacaccttgaaggcacggttaatgaagtcctgttgtggggtttgagggctggaatttaatttttggagttttatttaatgtccagagcagattgggtaataaaatgtattttgagaataagacggccttttgaccttttagggtccagggctgtaaagtgtctcagggttgctgccaaacgagccatgaactgggctgggtttttatagttgctgaaaaagagcctaaacactatctgatttgggataaagaaaaaggagcattaaccttgactatgcctttagctccagccacctttttaagaggaaattgctgggcaggtgggggagggctagtcatggaacgaaactgtaagccagaccgggtgtaaggaggagaggtgataaaaggattatagggtggaggagtggaggccgaggaagaatttggacctagcttggcctggtgaggaggggagaggtcagatgggtctgtagaaaaggaagattagaaagacttagcgacgcttggggttgggactgaggggacaggcaggagggaaagaaggaagatttgggatgagttgtactgggaacagagactagggagggaccgatgtgtaaaagaatgtctggacgtcaggcatctcagaccgtttgcccattttatgacaagaattatttagatcttgtaggatggaaaaattgaacgtgccgttttctggctatttggaaccactgtcgagtttgcattggggtcaagcggcatcgcagaagaaaataaggcatttaggttttaggtcaggtgtaagttgaataggttttaggtttttaagaacacaggctaagggagaagaagggggcaatggggggcagaagcttgcccatagtgaaggaggcaagcccagagaaaagagagagtagagacacggagagaagggatggggggttcttgccccctagaaaagctgtacttgccactaacggtgaaggaccaaggcaggcgtccctgcatggtcagacacctctgaaacgtgggtgaataatcatgcagacatccccgtgtgattaaacaccaagcgaagactgtcttcccgagtccgtgaacagcgccagagttttgggtccacagataaaacgcgtctccttcatctctaccagaaaaggaaaggaactgaaattaagagaagggagagattgaagtgtggcgccaagattgaaaggaaaaagaggttgagggatagtgagagaggttggagaagagagtaaaaagaggccgcttaccagatttaaaattggtgagatgttcctttctgaggaccagaggtcataggtggatctttctcacagaacaaagagcaggaggacaggggattgatctcccaaggggggtcccccgatctgagtcacggcaccaaatttcactcgcgtccgtgtgaagagaccgctaaacaggctttgtgtgagcaacaaggctgtttatttcacctgggtgcaagcgggctgagtccgaaaagagagtcagcgaagggagataggggtggcgctgttttataagatttgggtagataaaggaaaattacagtcaaaggggggttgttctttggcgggcaggagtgggggtcacaaggtgctcagtaggggagcttttgagccaggatgagccaggagaaggaatttcaccagataatgtcatcagttaaggcaggaacaggccattttcacttcttttgtggtggaatgtcatcagttaaggcaggaactggccatctggatgtgtacttgcaggtcacaggggatatgatggcttagcttgggctcagaggcctgacagtgtgttgtctatgtcctttgtctattggttttattttgaaggaggcacctagtggttttcttctctttatataatatggttatcaatcattttttcctatttgtatgtgtgtgtgtatttgtgaaattaacccctcatcatgattaatagtggaccaagaacaaagtataaaaaataatatcatgttgagataacggcgtagaatggattttaaacttcttaaggcattagggtgcaaatgatgtactaaacaacatagaccgatctttctgagtaaaaacattctatttccactctgtgtattaatatgcattggacctggcctttcaaacaaatgtgatattcagggaactgccgcaattgagaccttaataaaccagtttcacttttttcagtaaatctgtgaaagctattattttacattttctccactgttaaaatacagaaactgagagaagtactcagtatcctacccaagaccttatttttcttcaggatgcatctcatgttttgtacttcactgtctttggctgtttttttctttattatttcccattttcttaagttgatccattataaaaacaactcctgcttacaggactatttttttccttccagaggcgtgctgttatttcataggtgaacggatagtgtcctgatggtgtctgtggcccttgaagctgcagtttaaggagggggttcaaagaaatggtagagaaaggtcgtccctgtcctggaaggatgccagataggatgacctttgaaactgtcatcaggggcatgaaaaatgggtttgcaatagttccctgcccttctctgcataaacgatatacagcatttgatattaaggcaaatatccttttccattgatgatgtgtaatcataaatcataagaaatttctatgatttcggattcaggaaggcacctttctacctgttgcagctgttgggagtcattctccctccagcccgactatgtcttcccactgcttttggctgctcccattggctttcacattctcctctccacctttggactatcccctacccttatctatccacacattcacttcctacattccttccatgcctaatcaggacagctcctctgaccaccttaacttcccaggatgtccgcgtgctctggataaagtgcgctaagccccgccccgcccctccccgtgtgatctgagtcgggccccactgactttcctgtacacacatcctctgtcctccttggacccatatttgtagtcagtctctctgttcccactctgcatggcacttgacctgatgctgggaaggtaatcattatccttcccttaatgtttcaggattattcattctattttgccacatctaatgtaatatttaatagcatctatgaagaagactgaagactataaataaatgctctctttagtattgagaaggttttatacaatataaaatttagagtacatttttttctcaggaggtctgacattaatattaatcgtgagccccaaagtagaagcttttatattttagcataatgaagtttaccatatgtttcaaagtcacttgcaattgtgcttctcataatgacaattagaaaggtcatcctgtcttgccaggctccattaggtatataaaccagctcgtggctgtcaccgtgaaatgtgttaaggcacttgtatgcaaattcaaggggagacatgatattttttatcccaaagtgtagctgtttacaactaattaccaaacacggaacaagcctattgtttgcctttacatgatatatgggcatagaagtttctaaagcaaattctcctctgtcttttcattgattaaattatatgaagtcaccctcttccatgaagcattacatgatgaggtccccaaagcactgaataaagaaatttgtcattaagacactggtgtatttctgatctatatattttttttctgcttcactcgaaaaacttattatctgcatgaaagtatggaaactgttattgtatttaactctctacatgtgaaccttgaagaaatgatggggcgaaggtgaaatgaaagggaggaggtgaggaggtggcacaagtaatgttttcttatggaacttgtagagggataaacctacattagaatcaaagcaggtaattcctgggaaactgaagcatgccattgtggatgtgggtcatgggaactgatgctggaaaaaaatagttcctaatctggtttgggaatggcaaatttcgttgccacaattgaaatattaatatacttctttgtatgaatgccctttcatttatgccttttttttctttaagaggcattttttctctaagacaggctaaacttctgtattcaagcctttagagtttgcaaacatttatcaatagataagaaagatagataaaaagtcctggattcattaatgcacagccatggtctctacagttttgaaatttctcacttgggagaatactggagaagaacatgtggcccgtgaagcatttgactgttaatatttcgtactattcagatgctttaatttaaaaaattaatctatgaatttaacatatattcatgggatgcagacactgcagagagctgcctcttcctggactttgtgtttgaactgtgttccggttgcttaagcacccatctatctggaatggtttgtgttcaggttttccagaggaaaggatgactccatgttcctcaaggaactttccaggcaaatgaatttgttattttttaatattaaaaatgatcctctttattgagagtgatagactaagggaggaataaacagttgtaatagccctgtgacacataagcggagaaaaaaaccccctccatgcttatgtaaataggaaggagaacaactgtagcaagaatatagaaaaggactcctttcttctctcttccactctcgttttttgccctttggcctaaagctgttaacattgggtgaatgtccctgtcgtcatcttgcattatatctcacgttctgtttgttattgatagggatggatatctgagagtctatatcaagagttacatgtaagtttgtgtaaggcccttcttttgcttctacatttttgctcgttgtatggatgcattttgtaggactgtgagcttatatttaaaacacctgtgcggcagtggacccttgtcaccgcctggcctctcattcagaagccttagctgttcctcaactcctacaacacatgttgagcgcctctcaggtgccagctactgtaataggcactggggagtggaagggtgacaagatgtgattcctgacctcgagagctttgcagtcactggtggaggaggcacatgtacacagcaaatagggcacgatgtgttgaaggatgaaatgaagcaataaacaataggtatcaagacagcagagataaggacaaccaaggatgccttcgaggagccagggagagcctcacagaggaggcagggcatgcaccgtggcttggggatggaaggggcagaaatagtgttgttttagggaagaggagagcacagactcagaggtcggaggaacgtggcacatctaggagacagggatccaatcccagccctaccacttagcagctgtgtaactttgggaaagtttgctaatcactctgagtatgtttcctcccacgtaaagtagaaatactactactactaatattgacctcttaggaccatgagtagataaagtaataatacatgtaacaatcttggcttagtgccctagcgtatcataaggactcaataaatattagtttatgtgattattgatctggctggactgaagggtgtaagagtgagaatgataggagatgaggctggagaagtggacagagccaaaccatgagataccttttcaccaggctggggttttcaagatttctgaaaggtcgtggctagccattaaaataacttggtttctgtatcctccactgctcctgaacattcttgtattacagttgtgttagtctgtttgcattgctatcaaggaatacctgagacagggtaatttgtaaagaaaataagtttatttggcttatagttctgcaggctgtacatgaaatatagtgctgccatctgcttctggcaaggcctcaggaagcttacaatcatggtggaaagggcaggggagccagccagcgtgtcacatggcgagagagggagcaagaggcgaggtggaggtgccaggctctttttaaacaaccggatcttgtgtgaactcattaccacagaaagggcaccaagccatgcataagggactcgcccccatgacaccagcacctcccacaaggccccacctccaacattgaggaatcacatttcaacatgagatttggagggggcaaacatctaaactatatcaaaagtcgatgattaaacacagtctcatataaatgttctacctcaaaaaaacccaaacattgcacacctattatagctaagataaaaaatactgacaacaccaagtgctgccaagaaggtggagcaggccaattgctcatacatctctggtgggatgtgtcagtatcgcaggtggggttgtaagagtagagccatctggaagacagtgccagtggcttatggagttaaacattacacttgccatgtgacctggcaattccactcctgggtacttatttatcctctagaaataaaaatttatatcccacaaaactgtaatgaatatttatagcagctttattcataattgcctaaaactgaaaacaagtcaaatgtccttcactgagtggatagaataacaaactatggtaccttcacatagtggaacacgactcagtaataaggaacaaactatcaatatacacaacaacctggctgcatctcaaatgcattgtactgagtgaaagaaaccggtctcaaaaggctacagctgtagcatcctattcatacgatgctctggaaaagagacctctaagggcagggtttaggaattgggagaggggctggggaagggtctgattagaaattaacagcccaagggaattcttggttttgtttttatttgtttttttttttttgttgttgttgttttttgagacggagtctcgctctgtcacccaggctggagtgcagtggcgcgatctcagctcactgcaagctccgcctcagcccaagggaattctttaggggccttgggattgttctgtatcctgtttgtggtgatggttacaagttacagcccatagaactgtacaacaagtgaattttactgcgtgtaaatttttaaaaaattttaaaaacttgaagacatatagctcatttaccacgtgctttacctgtcttatctcattaatcctctctatgaggttgatgttattattacaggtcgaacattcctaatctgaaaatccaaaatctggaatgctccaaaatctgaaactaattttgaggcctgacatgatgctcaaaggaaaagctcatagaagcatttcggattttgcattttcaaattagagattctccacaggtaattatgcagatcttccaaaagctgaaaaaaatctgaaatccacaacacttttggtcctaagcatttcagataagggatactcaacctggatctctattagtgcattattatctactactattattattattgactaagcagaggctttgtgaggtttggcccaaacctacataccttccagggggcaaagcctggcacaagccaggtgtgcacactccccagaccctgaatttccacagcattgcgagtcacccctcaaggagtcacagagtgggtggtagatctttctcaggctcttgtacaggctgtacctcagtttatccagctcattggtcagtgtggttgctctgtgcatcatgctggtgcaacttttacaaatgtgcaaatgttctaaatgcttagtatcagagagggagttgcctactgaatattttctgacctcttaacttgtactgttggctaagttaaatttggcttcttttcaaggaactattaccttcctagagggtttgtgtggtgacacccataaaaatcttattcagtttttgttcaattcacagctttaacttagtctccttaaaaatcactcaggttgtaaccaaaggctgctctatggctgagtagaattgttaattattaataactgttaatcaactacatagtcaacctcagacaagagggcaagagataattccttagacacacacacaaaaagagcaaaatgttaaggttagaaaacagtaaaaacgatgaagatatttaattctttttgcatactttgtaattatttgtttaaatatctatttccctagcctctgtgccagtttttctcgttgttttttatttttatttttttaagagagggtcttgtgttgttgcccaggctggagtccagtggtgcaaccatgactcactgcatcctcacactactgggctttgatcctcccatgtcaggctcccaagcatctgggactacaggcatgcaccaccatgcctggctaatttttaaaacatttatttttgtagagataggatctctctctgttgcccaggctggccttgaacttctggtctcaagcaatcctctcaccagtcctctcacctcagtctcccaaagtgctgggattacgtgagccattgcgcccagccttttcgaggctattagttttctgcccccagttcctgtaatccttgcatagaataggggcttagtaaaggtttgctgagttagaactccatttcaatggatattgaacttgagaactgagtgagacttgtggagtatggtatttcaaagtattatttatccaacagtctgatatttcagaatcattcatttgccaactcctatgtaggtactttggagatattatttgagttattccttatgacatcccatgcagcaaacatattccttcctaaatgaggaagctgaggctaggagtgatgagctgatttgcttgttatgcacactggatggagtgtgagctgtgtcagacacgtgaattcagatcctcttgtgccacatcagagggacatgagatggggtggctgtttcacttctgtgagcctcactttccccctcattcatttatgtaaccaatggtgggtccaggttttgtgaggactggagcttacataatttgagtatgggtcttatttaaagaaaaaaatatataggattatgattcaaatttggatacagggtttgaaggagacttgtgacagcgggagaccctgaggcttatgtgccattagattcatggtaaatctgtccttgctttcaactaatttttatagtgagccactacgtgccgggctgtgtctgcagctggttacatgtgctgagcctaacagtaccatcctggtcctctagaatgctagagcccactgggagacaccaccagaaaacagacaacggcagtacagtcagataagtgtatgatgggggggtatgaaaagccaggaaagatttctggaagagatgacatctaagctgctactcaggatatgtaaaagttaaaatggagaaaagtatggaaagcccatttgaggcagaagaaagaacaagcatgagaggtgatagagaaaagcttccttatggggaccgcaagaagtttagtggggctgcgttgttcagtggggtggaggagtggggagagcttcagctccagaattaggcaggggccaggtgggcttgtgtaccacttaaggagcttggaaatggtcctaagagcaataggaggcacttggacagatttaagcagggagtgatctgataagatttgcattggggggatgaaaaaaaggccacactgggtccagctgcagaatggagagagaatccactccacactgggcacgagggccatccccctgcagggaggccagtggcaggagagaggaaggtgacaggagagcagctgtgagaacgaagaggaggggatacgttacaaagttgttcagcagtgagaaccaacaggacttgagagtggatgcttagaggcaggaggtgcaggtggtcatgagggaggagataagatagaagcttagctttctggcctggaccaccggtggggggtattcattagaatcaaggccataagaacagcagatttggaagagattgtatgtctcctttgagccagttgagtttgcagtttctgagtgacatccaggtggagatgttcagtggagagctggttgcaaagctgaggaaggagagctgactgacggcagggctttggctgttctcagcatatggattataattagagccgtgcagatagatgagagtgcatgggaaaagccagtgcagagacaagatggtgcaaaggagtatcctaaagaacattaatctttaggggacaggcagaggacaaggagccacaaagaagcatgagagactgtggtcagggatgagggaggaccggcaggagtgtgtgaggagcacggattgtttttgtttgtggggttcccctgcctttagggacacactaactctttggatatcaactggttgtcccggaattccatttagctctgtttgacttgtgtgcagagcccatggttttcacagcccctcttcctttcagatttgataatttgctagagtggctcacagaactcaggaaaacactttacttatgtgtacaggtttattgtagaggatacaactcaggaacagccacatggaagagatgcataggacaaggtatgggggtggcgcagagcttccatgccccctccaggtgcgccacctcccagcactgccatggcctcaccagtccagaagctctctgaaccctgtggtttagggttttcatggagcttggttttatacattttagggagacatgagacatcaatcaaatacatttaagaaatacattggtttggtccagaaaggcaggacaacttgaagcaagttgggcgggcagggaggcttccaggttataggaaggtttaaaaattttctgattggcaattggtcaaaagagttattatcaatacccagcattttgggaggccgacgggggtggatcacgaggtcaggagatcaagaccatcctggctaacacgtgaaaccccgtctctactaaaaatacaaaaaaaattagccggacattgtggtgggcgcctgtagtcccagctactcgggaggctgaggcaggagaatggcatgaacctgggaggcggagcttgcagtgagctgaaactgtgccattgcactccagcctgggcgacagagcaagactctgactcaaaaaaaaaaaaaaaagaaaaaaaagaaaaagaagagttattatcaataagaaggaatgtctgggtttcgataaggggttgtgcagaccaaagttttctcatgcagctgaagcctccaggtggcaggcttcagagagactagattgtaaatatttattatcagatgtaaggtctgtgttgatgttaataccggaggttatattgaggcatgttcaaccctacttcccgtcatagcctgagccagtctttctggttaaattttagagttctctggcctggcaggaagtccatttacatggttgaggaacttagaattttgtttttggtttacaaagagaaagcagagaagggtgatgaatgactgagccacatcctggtgccagctctggaccgggtttggctgtggtctccacaaacatttttgaatgaatacatgagtgagcaagtgagtgagtgaatgggaggaaggccggcggggggaggtttgaggagagtggggaaaggtctgctgtggtgccttgaaggtggggagacctggcacggggaacacagaattgccaggtggatttggtgcccatttggaaggtggcccagtgacttctggggacagtgtccctgagatcatgcattttccccagctgtgctcagcagcctgcttcagggagagggaatggcaacagcgagcacgccaggctgggggtttccaggcaggtagaggagaaaggcaactgggttcgggagccgaacggagtggcaggaaggtgagtgaagtgatggatggctatgtctacactggaggctggtaaaggagggaaagtgataggttgaggggtgggtggctggatgtggtcgtggaacaggggcagaaataactagggtgtgggaaaagtagtggcaaggtggctgggagcttggtggctcagtttgggtgcagatgaagccaaggtgaagtgaggtgggatggtgagaccaaggacccagaagcccaggtgtcggcctggtgatgcaaggatggcggcagggctcggggtggggaggaggtggaggtccaggatcaaggcccccagagaagggggatgtcccagatgagagcaatgagaaggacagcttggggtgaagctgaatgccctgagccttcaagcagcaacagattatacctgaaggtagagccacgttagggacgtgggaggacactgactgcttgggtaggggtggggagtgagcatccacactcgagtggctgcagatgccatgagaccctccagggatgaccaggtcactgttagggcagagaggaggaggcagctttcagaaggagctgggcatgcagagcttgctaaccagtgatggaggatccaggcagtagggcaaagcccatggaggggcccacaggacgggacaactgcgaagacactgtctgccttggaatgcgggcagcatcttcatagccatccagggatttggaccctggccttcctaagtgagagctatactttttctataatttctgccactacataactgccaaagttaaaggtggaaaaagagtctctgtcctagcttttcagcgaccttttcaaaaggaacagaaaatcgtcgcattctcttgcttctacaatgccagtgattgtctgatgcatcctgggtttgacaaaggcaggtagacactcacggtgcagggacacgccagttccaaatcgcatctttactttttaaatgttgaaaaacaaaaaagacagtgcatcttagaatttaaggcaacatagtaactaaagtggcggaggcttttaactgaaaccagaagaaacagcatgagttttgttgttttatgtttcttagctgaaagaaactcaggcaggataacgtgataaggaaactcaggtatttgcctgtgattagttcaggaactgttgaaaaaagactctgggattgggcagaactagagtttagatcactagcttgaaggacttttaagtccagtttaagatttggagagagttataaaggctaagccagcatttataagaacatgtaccaattagagaagtacaggagaatttgctgttttctctgttattataaagatcattgttcttaaatttacattagtttgctaggcctactgccacagaaaaccacagactgagtggcttggacaacagatgtttattttctcccaactctgaaggctggaagttcgagatcaaggtgtcagcacaaatggtctctccctaagcctctctgcttggcttgcggatggctgtcttctccctgcgtcctccctcacatggccttccctttgtgtgtgtctgtgtcctcatctcctctcctcatagggatgccgatcagactggtttagggctcaacctcttgacctcgtttcaatgttatcacctctctaaagaccgtgtctccaaaaagtcacattctgaagtaccagggattagggattcaacatataagttttgggggaggacacagttcagtccatagcagcctattccatacctcattttataagaagagaatttaaaatcagatccttgcctagcactcttctggtcacacacagaaaataatccagaaagttaccttggctgctcagcctcatgtggctggaccctctgttgctgtaagacctcaccggacccttctccgtcctcgctccttcacatgctggaaccttccttacatgtctagatgcaccgagcttgttcacaccttcagggtttgttccctcatcctaaaatggtttctccttagttttatatggctctacccttgtgccgttttggcctcaagttaaatcctgttcctccaagaagcctccctgaccatccaatggaaagcagccacccagcaatgccagatctcattaccctgtctcagtgctcagtgtggtacttattgctggctgatagggcctcatttatcttgtcaccaatgtccccagcactgaagcaatccccagcagatagtgtcactcaaatatttgccaagtgaatgaataaaaccagaagagttaggaagaaatgaagagagctgctgggaagaatctggatgttcctgaagtccaagactttatttttttaggtgggattcatcaaaaggaggcagtttgcctgaggtcccttccctgggcaaagagagaaacagggctggtctgactccaggcctgtctgtgactttgattgttttaacaagcagatggtatttttgtacacagtgacttggagaacttggagacgcgtatcaatgccgcctttcttccctgtcccttgcataacaggtttggtgtcttggatcaagtttggggcagcatcaaactgcgccactagactgcatcccatgatgcagggattatactgtattcataccctgcagtgtttgcacatagaagccttactataaatgtttgctgagtgaaaaacagtgaataaatgagcgaatatttaaatgacaagaactgacagtcttttgaagttcctctagggtggtgcttctcaaacttcaacatccatctgaaccatctggaaagctagttaaaatgccaggtgtgattcaggaggtcctgggtagcctgagaatctgcatttctaatgagtttccaggtgatggtattgctgctgttctcacctctcctttgtgtagcaaggctctaggatgtgtccaggatggtctatctacttggtcaaagataatcttgtgagttgactagtcatcaaaagaccccgatcacttctcagtttgtccaaaaaataacacatgcaactttcagccagttacttaacctcagtgatcttcagtttttgtgcataggtgaattggagatgggtgttaatgccccctttcttccctgtcccttgcatattatgcctgatgtcttggatcaagttttgggcagtatcaaactatgccattagatcatatcccatgatgcagggattacattatattcatactctgcagtgtcttgcacatagaggccttactgtaaatgtttgcagtgaaacaacgaataaatgagtgaatatttaaaagacaagaactgacagtcttttgaagttcactttggaggaacctagtccaattatcaggagatattatttgttgaacactttgtacctgctgagcttcttgatatgtgttacgtttacttatcacaacaatcctgcaaggtggaattattatcctcatttttttttttttttgagacagaattttgctcttgttgcctaggctggagtgcaatggcctgatctcggctcactgcaacctctgcctcccaggttcaagtgattctcctgccttggactcccgagtagctgggatcatagggatgcgccaccacgctcggctaattgtgtatttttagtagagacggggtttctccctgttggtcaggctggtcttgaactccctacctcaggtgatccatccacctcggcctcccaaagtgctgggattacaggcgtgagccaccgtgcctggcctatcctcattttacagaagaggaaactagtgctcagagaggttagacaacatgcccaaggtccccaagtcaataaccaggagccaatagcagggctctgatgatgatgatggtggtgtgtgtgtgtggtgtagtgtatgtttgtgttttcatgtgtatatgtgtgtgtatgtgtgcgtgtgtttccctcataccattttgcttatcaaatgatcctttaggttctttccaagtgtatgattttaggtcaaagacaaagcatgacacagttcactgtgaattgtgagttattatacaagctcgtgaaagagtcggataccttttctgatcctcaatataacctttgtcttctcaccaccataacacgttggtttctcttcaggaactgattttatattctcatgagcacatatgcagtttctcctatagactgtaagatttttaagagcaaggactgggtcttatttttcattttgttccctagtgtcttcgatccttattgcattcagtggtttgatttgaacagaactttggaagcatgagacagactctgtacattaaaatgcttccatagcactcaccatggtgtccaaagtgtcactaaatctctgcttgcttgagatttctctatcttaattaatcttgatttgtgctgtttttttgtgaaagagtaaatgcctgtgggagggctgggccccacctacggagaactctggtagtgtgccaagagcaggactgcataattggtgcatgtgacaaggaacagaggagggtggaggggtccctggatgatgggggtgccttccccttggctgtctttattgtgtccccattggcattactgttactgatcactaaatcagggaacagacggaggcgtgaggtaggatcctacgacagacagcctttagtgagttaccaatgacgccagagttgaccatcaagtaaatctgttgccttttgaaagacatgtctgtctgtacaatgctagggcctgagttgcttaaccttctagtaaaccatgaatttctctcacatgtccttggggtgatgaaaatcttcccgagttgtgcggagcacaaagtagaacctgacagggaatgttctgaaataattgtgtggatggtgacaggtaaaaaaatacactgtagagatatcgatcctgtacgaatgcaacctaagttgttgctctgttaagaaatgtttttggagttctctatacactaaaaaaagaagaaaaagaaaaagaagaaaagtggaaaagaagagatttctcttgtcttgtatgaagcagcaaaataatattctatcagaattgttttaaatatggtaaagtggggcacttctatttaaagggtacgtctttggttcattttttatttttaattgccctgatatctcttgcttttgggaaagtccgacgctctggctctctgctatctgttcaaccagccttcagtagaagtgggaacacaaatggctcattgttttaattttggatttccttaggctgttgctgtcacctagtcatctcagacactcttacagggaaaccagcactggcagggtgtgaaggtcatagcaagggcagcagtgcttcccaggatcatgtgcctggagaggtcggtatgccctgacttctaaagggggcctgccttccacaggacgagcacttactgagcgcttctcctgcacttactgtacattctcatccatatgttagttgttgttaccataaatgtcctcacacatctgtggcatgtggatgacaagagcttctgagtatattttttaactgtgtttttcgaaggcaactttaagtgctaacaatccagtggttatatgggtggctattgactttcagattcacggcactgttctgagtgggtaattcgccgcctttctctaactcttatgtccttgaggaacctgaatgtacagatgattacctgtacctactgagcatcctctcgcagagttggggcgataaatattctgcaaaacctgctataaaacagtcagccctgagcagcaggaaactgaatatagtcactcacatagctaaacccaggctcaggcctacattcacccctgtccgaagggggtggaaatgagatcatttcacacctcacgtggaagtgcagacctgaaagaagacttggggctcccccagcacaggtgtccccattttacaggtgccaaaggctgtggcggagacagagatggggagaggagttggccgtgatgcgtcgtcatggagcatctcacatgtaagggccatgagaagtgaggacagaagggcagccaggctggctggtcttcatgtgggccagttgagtgggaatgcggcactcatgggccggcggaagaatgagcatttgaggaggcagagttccccactcttctgaacctctgttttacaaaaggcttagaatataaaattgggaccttgtctttggaaaggagggagcaaagtgttaacctggacagctttggtgcacaaggtgagaggtttaccaagggctcacacactctccttcatgggagagggtgcttaggaggaggtctggctgctgtgaggtatgggacctgtccaggaccttctactgctacagcaggaacagcactgtgagggagggatgttgctcttcctatttttcagtcgtggaatggaggctttgaaaggtttggtaacttgctcgagatcacacagccagcgaggggtagcatgggattaaacaccagtcggctcgtctccaaaggcctgactgacaaaaacaaatttcaatcgattttacttttcctctgtaatagatgaggaatatctcatttcagaatatctgaaggtgacatttggagtcgctcattgattcaattattctgaatctttatttcagagcttatttatctcaggttttagatgtggaatgctccaaaactattcattggtttcacttccctttgcattgctaagtaaaggtgatataggagaactactcacaggggtgagcacagcaagggtacgaaggatgtaaaatcagacgcagcttttctatgcatctttcttaaacacattactcttaacccaagagacagtcaggatcattaactttcctaatattttgtaaagcattcatatagcaacatttggggcacatgcgcacctggtcttaagtcagggcaggagtggctaattaattctctgattcctcaggcttcacagtttcaaccagccataattattttgcaattgaggttccctctctgcctaaactggcattgttatcaagggctaaatgcatcagctttgtaataatgaagatgggtgccaattccatcttccatatgggatgaagttggggagagagatggtggagaagcactggtcagactgtaaatgatattgagtagaaagaagtcagggatttttgtttttaacatgaaaaagaaatagaattgtaactaagttgaagtttctttactgtttcatcttgtttctttacaaatttcatcttgtcatttacaagggtttatgccacatagctatggatttgggcccaatatttgaccttatagcagctctaaaatattagactgcagttaggaaatgccctctggatctgatttttaaacagaaccaaatgcattctactcttttctgcttttaagagtaacactgcttgaggatgcattgaagccctgctagacatctttgctgatatttgcctttagcattctttctggaggtatttagaccttaataaactaccattatcctttaaaaaaggactgaagagaataatatttgtagaaacaaaataatcaaatacagtcctacatcatttaatgttggggatacgttatgagaaatgcatcgttaggcaattttgccattgtgtgaacgtcatagagtgtacttacacaaacctagatggtgcaccctactactccacacccaggctacgtggtgcagcctattgctcctaggctacaaagctgtgcagatgtgactgtcctgaatactgtaggcaattgtcacactgtaagtatttgtgtatctgaacatatctaaacagaaaaggtacagtaaaaatgtggcattataatcttaggggaccaccatcacatacatggtctattgctgattaaaatgtggttaagtggtacatgactgtactagcattaaagttcttccgaactgagagggtggaatgggaacaggtactggcttcttgttttaagggctgactggtgaggaaggtactggcttcttgttttaagggctgactggtgaggaacttgccacacagagcagtaggctcaactaggctgaagacaggctacagataggctccagggttgacccagggccaagatacagcagctgccttgtcctggctcgctgcagacttggcatctccagtgcctgtatccctgaatttgtggttgaacttaagtttggggagtcccagtggccctaatgagactggaaataccaccctaaacaacctcctttagcagctaaactgacaataataatctgttgtttactgcacaggattgagatgagtgtagcaatctcctagacgaagggccaagctgctcacccacctgggtggggtggtcagtctagggcggcccaaggggattcttgggtcacgatgaccctggggctgataaccaactcacaaatacataaatcaacaacatgaggctagcttctgctggggctttgttgtctggtgggcctgagttttaatcccggctgacctcttactaagcgattgtgggtaagtcattctaatttttttctctctgagcctcaaattcctcatctataaagtgagcatgaaatcctattctagtcattctgagggacaactgaagtgatatatgtgataatatgaaatatgatagatgtgatatatagaactgtaaaacttttaaaaagtaaaatgcctgttaaattgttaaatatgtgtaatatgtgaaaaactcctggcaaatatacctactaatatccatttccatatagttcttttatataaaaggtagagcagtatatgtaaaccttctaataaaacacttagctataactatgaattctcatgtgctcttcctgctgtcagcctctcctcctgctgttaaatctttgcaaggcctcctctagttgttatgttctgaaaagattcaagtttgtatcctagacttcaaagttatgtctctcctatgtggtgtgtagtgtatcaccctgtacttggaggtatgtgatacaagaaactaaggaactaaaataattctttttttttttttttttgagatggagtctcactctgtcgcccagtctggagtgcagtggtacgatcttgctcactgcaacctctgcctcccgagttcaagcaattctcctgcctcagcctccggagtagctgggattacaggtgcccgccaccatgcctggctaattttgtattcttagtagagatggggttttaccatgttgaccagactggtctaaaactcctgacctcaagtgatccaccttcctcagcctcccaaagtgctgggattacagacatgagccactgtgcctggcccctacaataattctttaatgtgaggaaatatcaaatgaaaaataagaaattctaggtaaggaaagaaatttatttagtggaagtataaaagaagtttaaaaagttgaagaaaattttggttttcaatgttgatgcagcgtcctttgtgaatctttaaatttgtgaatgacacttttgaaaacttacaccttattctaagtgtctttgttcactttacactgtactgtaaagaatcacaagagtgtctcataaataactttctatataacatatgtatatttcaaaataacatgttatatatataatacatacaatttttgtcaattaaacagtacattaaaaagacaaaaataactttccataaatgagctcaagttatttcatccacagtgatagaatgttccccatttgatgcaagcagttaaacttaatttccattaagacaaacacacaaataacaatcctccttcccaaacttgaaatcccacttctctttttgaactctcttcatgaagtagtcccttttcttgcatttacaacataaagcctaaaccacaaatattggagggcaggggttgaggatgagcaattgagatgttcctcatgcccttaaaccaagagtccttatgttctctccttcctaaggatggcttattttcctttccatgaaatgactttaagggtgattatatccaaagggaagtgacgtttccccttctttctcttcagttggtccattttcacagcccacaaaagcaagtctctattttgggacttgattcaaagtctgaaaaaaccctaggcacatctttcttccttgaatatgttcacgtgcatattccaaaaaaggttctcattgctagttaggccattaattttatgtgatatccaaatcaaacagctgctgtactgtttaagctcagatcctaaaatggcactttgaacatgaaagtcgtggctgccactctctgggtgactatctggcgatgacacttctacctttgtttttggcttgacgtgcatatgccgaaggcttcagcaaacataaactcatacaaatgtttgtcaagctgtgtgagcctaaacagctcattagttgcaagaatgatcagatgggagatgggttgcccaatttggatggtgacctttatgagctctcggttggattgcagatttatgtgtcacagtatattggaacataatgaatcctgtggcatgtggatggtaaaatgcagggcagaaactgtgcaatgaagaggcaggaagaaggtggcaggtccaggagcataagagcagttaatcatctcctttcccccttcccctattctgcttcccctctgttctcggggtgcccattaaaatgcagttggtaatgaaatgctgtttgaaatcaaagttgctgaaacgatattgtggatattgtggaaatctgtcatatttattttaaggatgagcttacttccaggtgctttcagtgactgcagccccgttagttcccatgcattgattctctctcatgtccctgctccagggtaattctcttgtgctcaggcacatgaccttctagttgaaaacctgcccctgccatttctttatgtggctgcggcccagggagcttgcctgccctgcgtgagcaggttgcaatgataatggttcccagtgctgctcagtggggaactgaagtcatggtattttccttcatatcctcttgaagcttcattttgtgaccttgtttcatcctgctgaacctatcattggaattaccccaaaggtggtggcaggggagtccccagaaaggagtgccccaaactttcccaagatggggcctactgagattccaaagaaagaagcagtaaaagccggagtgatcaggccaaagcattcattaggggaacttaggcagagtgggctgcagcaatcctgcggcggcagcatgaaaaaaggggtcttccacctagaaacatccacagcgaggtgctcaggggatggagtttacatgagggtttaaggaatttggctcagggccagggccagtttctttcagtgttttgggcaaaagcttagatacctttatcaatgtgtgggaatgttcaaggccctggtttgggttcaagcctgctgggaaaaacctgcagctgtctgggtcacagagcggtcaaggcactctgtgagttttggtcacaacagaaaggcaagggctctaggggaccctccagaactacaggctccaatgtcagccccactttcccaagtacaaatttatttcagaaattaaagtactactcttactttttcacacatttcgaagtcatgtgttgacatggatagcctgtctagcacaggaaaactctgatctatttaactgatttaaaatgtttataattgattatctggataagtgtcattgatggcactccaggtgtgtgaagacgccactggcctgggaatcacgacatgtggggtttgtcccagatccctgccatgccatttaaacaccatgggcctcagtttcctcacagcaaaaattagggttatactagatattctccatggaccttgtcaagtattttttgtgatgctgggattttataactaacacaggcaaacaataacctagaatgattagaatcttgaaaaaattgtttgtttgtttgttacagagaatcttgaagttagctgaagtctgtttgactttcttccggaatcagcacagtccaaatgcagccatgacttctcactgtcagaactagacgggccacactgagaaagaatgtggaccggctacccggaatctggccgcttagtgcattcaagaatgctgcttggtttctatggctgtgatttccaagcattttctaaaaggtttatagaggagaaacctaagtgcctgccaccaccccaccttgaagtcaaatttccctgaaggcactggagcatagggagaaaaacatcagctaactcttgccgctataggcccgggttaaattgcagctgggaaattcattccagtggcttgccgggctaaacacaattgtggatggagcctggagaagcatccaagcaaacaaccacttgtgtcagttcagttgtttcaccaaaaaagcaaaataaaacagattttactaactcaattaataattcagttgccccataaaatatagcctcactgaatttcttgtcttgtcttccaagacattaagtcagggcttatttatagccatggctctcttccctggctaagcatccgggccacctgccccagcaggtgagcccttggtccaaggtggtcctggactcagcatgtttttcagagttctccaggtaattccaatggttagtcaatttatcattcatttggggctgattatcagtcttccatgtggataaaaccagttaatttcctgtggatcttttttgaaagccttattaagaggagggagccctgttttgaacttgtgtcatgagctctgcctgtctctggaggtggcaagggtgctcgtcttcattctggtctgtgtcgcatgctgtcttcctctgtctccctactctttctcaaccttcttatttactattccacacactcgctgggttagacaaccttttctgttgttctgctgaaggttacaatttggagtcgattcctgtagtcttcctttttctattcactttcaaaaaagatgttgcaaagtccaagtttcttcctcatgttccgtttctctggggagtgctgtagaagtttccataccttcctgcttctggccttcttagtattttaataactcctgccttgttcccaggtttctccaagtatctggggaaagtagaaacctcagagatggggtctggaaatgtaaaacgttgatgaatttcagggtcacccttgtgaaagctattgattggtcagaggtattctggaaaagtctgcaaaatccagaagctaatttctattttaaaatacaccctataactcttgagtgcccactcatcctcagctggctctggggaatggtgtctgagctcacggtctcatctgtgggagctgcatctcatcaacctattttggaaaccagcatacttctggttctgagaattcagcttaaaaacaatacctagtttcctgtataatccccccaccaaaaaaaagtttgcaatgtgccccatgtctatctgacacattttcacttgtttcttcattgatgatctaggtctgtccaccctgctctatttcttttctatttatctccattatcttagtctatttgggctgctgtaacaaagtaccatagactgagtggctcataaataacagaaatgtatctctcacagttctggaggctgggaagtccagaatcgaggcagtggtagattcggtgtctggtgagggcctgtttccaggttcatagatggtgccttttcaatatgtcctcccattctggaaggggcgagggagctctctggggcctcttttgtaaggggactaattccattcacggagattctaacctcatgacctaatcacctcccaaaacccctacatcttaataccatcactttggggttaggattttaacaaatgaattttgggagggcacaaacatcagtctgtaacatccatttgatgcctacttcaaaattttttgttgctattacatcaaaatctcttctggctttttctgaaagtggatttctatgtaaccactttttcttttcttttgcattatgactgagtttttcttcttaagaaaacaagaagcacgggtagatgatggagagcatgagtgccagagagtaaggaagcctgggctcttctgccagattttgtgttagtcgaaaactgaggacttggagggttgatgagctgagcttttcgttggggctcctctttcccatccatgtattgttccagcagtacaaagtttgtcaatcagagagaatgtgggttcccatggcaaggtggcttccagttttcatactctgtaaaaggcttagtgatggaaggagattaaatgtaatgctttaatgtggatttaggtagagatcttgtaccacagaaaattggaaatcaagggtgaaaaactgagaaatggagtgatgtctttttcttccatacaatttcatatttgcaaagtaaattaactctaaatagtttagggttttattccagaaatctataaaactttaaagaatcttggcatctgattgatttttctagtttatgaaaaactgacaatattctaagccaaagacacattcaacataataatgcaggttgagtatcccttatctaaaatgcttgggacaagaactgttttagatctaggatttttttttgaatatttgcttatttacctgttgagcatctctaatcccaaaatccaaaatccaaaatccaaaatgctcctgtcagcatttcctttgagcatcatgttggtgctcagaaaatagtgaattttgaagtatttcaaatttcagatttttggattagaaacctacatatcaaaaaatattttgtgtaatgtcttacgatgtgtgtgtttggagccttctcagggttaagcagatatgaaaagcccacgttttcaggaaagaatttaagaaaataaagggccaacattttttccctcctggctccatgtcataatatttttgccggctgcagagtctattcttttctatcttcagacttatcactatcaagcattttccattccccacaattctcattttttgttatctttttgcacttgcaaaaactgaaatttggcttgaatgagacacatttccctaccctttatctctcactgattcattccttgaattgggacaaatctttctaatctaagccagtttcatcctcttgcaatacagtaacctgtgtcagcagagtcctgtgtgggatgagtttggcagaattgcagactgcatttttggacctagcagttgaagatgattctgtccctcatcaatttttttccgcaagggcacttttgccttcaaatggtattgtgtttttctatttcctttatctaaagaaagtcttcaacttagttttgttctgttcctgtgaatgtcggcacaggaaagtccttgaagaacatgagaaacaggagcttcatctgggctctgtgatggtgccgttgtatgaattgaaatccatcagggtgggactggttatctgtctaacaaagatgcaatgagacatgattgagagtgtgcttcgggtggagtgtttcttacattttgaggttaaaagccttttctgtcattgtttttattatttatttatttatttttattagagatggggtcttgctacattgaccaggctagtcttgaactcctagcctcaagcaatcctcccccaccttggcctcccaacgtgctgagattacaggagtgagccaccgcacccagactctgtcattgattttgacaagtttttttttttttttttttttttttggttgttgtggttttggaagttttttctcagaaaggacatacttgactgaatttttctcagagcctaattattatttagttatttgtatttatttctttttgatttcactacagtagccactatatcttgagtaaatttagcttttaacttgctttatgttttggtagatcttagtgattatgcaatttgatgatgccattcaatatcaaggtcagaccacagcatgtacaagaggttgctgtcacgtgatagttttccattttcatctcttagtatgctctcttatttcttgctttgctcattcaatgaatgttttaagagtctgattgagatattacctcatagtagattactttcccattaatgtttgctcactcatctgtaggcctaggaagctttatatctatttacaacagcgactaggaccaatagtgtgctgttaaatgcttaggaaccagttctccaggaaaaaaaagtcctgattggcaacgtctggccatttccatagtgtaaatctcccactgtggctgatttccagctatttctggtttaacaagtggctcacaaaattcttgaaagtttatcaactggctttcaccaggaggatggctccagcacccaccacacctgacaacagttatattactttacggatgataaaaagctttatcatcgttttatttcatttctgatttacaaaacaaccctgtagagtaggtggtgttatacatgaggcatctgagactcagaggcctaagtggctggaagtagctccagcagctattattaggcagagcagagacggaatgctgcctctgagctgagcattcttggtgttctcatcactcatggcaactgtttcccattgtgaggattcccttagtggtgtcatatttggactccaaagaagtatactcaagaaatgactacttcgatggttttagcagataatttttagttatttgaggataagaataatagtctgcttatgaaagaacttggtaaatttttttcttctggttttcagacaccatttctgtcttaaaatgaagtatctggtgtatgattgctttgtaatattttgttacttaagggtggtatccagacaacccttagttaatgttatagaatcagaactagaaagacctcttcattcttcacttagagaggatttaagtgtctctggccatttattgggttaataatggtgacttcaggtgacccaggaaacatctggatatctttgctgcacttggaaagacatttagtttggtaatattttcaaatcatgtgatcatttcaaaatgacttgcaccatggagtgatgatgtgatgctggcagcagctgctgtttgctggagatttcgtgtgtcaggcacagttgggaatactttatgaatattagtttatttctcaccttgaaggtagacattgttctcagtttgttgaaatcgaggctcatgtaagtaaaaaatgcccacattcatagcaaataagtgacagagttagtctctgactctgcaaaggacttatatggcttttgtataataaagtcggtcaccccattttggtaataaaagggataataaaagaccaacatgtcttcattagcttgcagataagctccaagtttcagcacgtgcatagtttgtaatgccttcacagggtctgcaggctcattgccatgaaaatatagaactaacaagaatttagttttgattgacatagtttataaaatgttcttttttttttttttttttttttttttttttttgagacagggtctctgtcgcccgggatggagtgctgtggtgcgatcttggctcactgcggtctctgcctcccaggtttaagcaattttcccacctcagcctccacagttgctgggactgcaggtacccgccaccatgcctggctaatttttgtacttttagtagagaaggggtttcaccatgttggccaggctggtcttgaactcctggcctcaagcaatttccttgccttggcctcccaaagtgctgggattacatgcgtgagccaccgcgcctggcctaaaacattcttttaacaaaagcatagctttatgttgaattcaggtagattcgaaccattgcttttaataacacaatatgggttctttcagactcttggggtagattgaacttctcataaaactgtcatgggacagattgcaacttctttccaatatcagaatctctaggtgagttcatccatttctttgccctgggctttttaagaaagtagggcaatgagtccctggtttctcatctccgtaagaatgaaaggatgctggagccaaggtctagtctactgccagtttctccaggaacaatgtggaggaaaaggaccagtgtagatcagaagtccatgagcggaaactcagaatcaaagcggttattcaattcttcttttcttggaggaaatcactgtgtcgcctgaagagaaaaatgccctttgctcttgcactggggagttctgtttagtgcctttccacacaaaagggctgtactggctggtactatagactttttttatgaagatctttttcataaatccttttgcagagtatagccaggtagcagtatatgaacattggaagtgaaacagttttcgtcacacaaaattaacaataaaaacacatgcaactcatcatttataaaacgatacttgcaatttttcattattctcatttctgagggcaaattttcagatgaaaacagaaaggaattttagaagttttcatttttttttcctacatcaggcttccctatatgtcgtctgtataacaagcaccttgatctttcattcagttataagaggctcataagcgttgcctctgttttctatatattggtagtgtcattagaaaacctgagggggtgggccgggcgcagtggctcacgcctgtaatcccagcactttgggaggccgaggtgggcagatcacgaggtcaggagattgagaccatcctggctaacacagtgaaaccccgtctctattaaaaatacaaaaaattagctgggtgtggtggtgggcgcctgtaatcccagctacgcaggacgctgaggcaggagaatgacatgaacccgggaggcagagcttgcagtgagccaagatcgcaccactgcactccagcctgggtgacagggagactcgtctcaaaaacaaaataaaacaacaacaacaacaaaaaaatctgaggaggtggacaccattttttggtactgaacgacgtgatgaccgtttaaaaagaaaggtagatgttaagaaggcttccttatacaaaaattcttgtatattgttccttccaattttatttttgttttgatatataaaatcctatgttaaatctctcatcctgaatatcagattactccagaaggagaaagtagcagtctaattattttatttggttgcatggtagtcttagtacaattaaatctcctttgaaagtttctcagttatgtagttatgaatagcactccacaccacggctgtggtagacctggagcggtattgggcccaggtcacagaatgatcacggaaggactttagagatcacctattgagtccctgttttagagaggagcaagcaaaggcccagagaactcactccatttgccgaggtccgacaagtgtgtaggtgagctggagccagaaccctgtctttcggtcttcactctagagctctttccaaacaaacatgctgacctgggagtctgacaattgctgtatgctgatgtttcctatttgaagtccacatgtctttgcaggggaagagaactgtctagtatcattcgttaatgcccactcttcatgtttgccaaagaccaccaatacattgggcagtgattgtgttacactggtttgtttatatgtcggctttcagtgatgccagaaaatcaaaaggaggttaagaaatcccagaggttcacccaggatgggaggctaaacctttgttgtattatgagtcttaattcaagataacataatctttagcctaataaacattaggttgaattttgaaaatgtaaacactaactgatctgtagactgacgtctatttccttggcaatattggccacacccattaaataataacttctcattctcccttcccccagcctctggcaacctctgttatactttctgtctctgaatttgactactttaggtgcctcatataagtggaatcacatgacatttgtccttttgtgatacgatattttctttaaaaagaaaatgaacagaaacagtacatgagagaagtcaggtctgcagccagtgtgcctcttagttccatattcatacaaggccctcttggaagctcagctttggagttggatattatctcagaagatatggcagcttaggaatctggtactctaaaaacagatttacaagcattagacttttttgtatatgtgtgtggtcattttagtcttcctgaaagtggttaagaccaatatttctaggcagactatagttcacatcatccagttctgtaagtcttggattatcgatctcattgtcatggcaaaaaaggacagggattactcaactcattactcctgtgtccagacctctgagcctggtgtgtgtgtgtggctcagtgcctttcccatagtggcccacatccccccagggccctgcatgaagttcctgcaagtctaccccctgcacgtgcagagcaaaaagagcttcctatgggagctgttctccagaaaagacagaaacccgggccctagagaaccagaagatttaaattccagtttcagctctgccattgactaattaggcaactgtaggcagttcactttgctcctttggaccagagatttctcatctacaaaatgaaaaacttggatttaattatctctgaagtcacttcaagcagaaatgtaacaattctttgatttattaaaaaaaataacatcaatgataatgaccaacagctaacacttattacaaggctccaggcactttcgaagtccttaatatttaatgttcactactaccttaggatataagtactgtgatgcagagtcctggacacagagaagtcagcaacttgcctgaggacagcctgcaggacacagcactgtgatttgaacccagagagtctgacttcagcccccagcgctcaactactattaattgaaagggcattgaagagacatgatgtcacaataaaaagaaaaaaagaaaagaaagcatgtcttcgactttctagtcgtcgtgctttgtatggattcttctttcaaccttgacgaaagggtataattaatctgtaattaaagtcatgatagtttcttaatacgaggaaatgttgtcattgcggttctctgaacacaagagggcgctgtggcaaagcttaccgtctgctcatcctctgccgcaggagggtacaacttcgtgggacaaacttcaaaagaaagatgccatttctaagacctcatttatcacctcgggatagccagtcttcatgcctttaaaatacagaataaaaataacacataaatcaacacaattacattccttcttgatagcatcaccagtcttcttgaggcctggcgtcaaacctctgcttcagtgttacgttatggggtgcgcatgcctccttaatacccaccttgctggtattctccagatggctgtcttcttagcagtagatggaattaagcaccataatgagggatattttatttaaatctgctttaaaaaaatcttccatgacttattcacatgtctggttagctatcacactgccattccatgtgatcggaaatgagaaagatttaaagaaagtaattgtttagcatgcaacggatgtacctcttttgcttcagatgagaataggcagcatagaagaactggggctgattcgtggaaggtttcccgtagctagaccctggaggctgtaaaaagtggtttggaactgtgtttaaaaaataataataatagagggaatagtgaggtacccaggaggagcagagagcgcctgttccagccatgggagcatccccatcagatacatagatgctcttaattaattaggctgctagtaaaccctcctgagtgtgcaagacaggaggaattcattttcaagctttaaaaaaaaagatgagtcttgggcacacagccctgtggcccatttgttattgtcgtgttacccataagtcagcagttttcctctcctgttgttgatagatcttcccatacagttagatttgtttagaaagaaaagttttaagtccttgcaaatgattacaaactgaagaactggaaaccctggttaggaaacagttggagcactatgtatggcttaatgaaaggacacagtctttttaatccaccaagcctgaatcatcagcttggttaagactatctgtagaaggtgagcagagcacttcaaacctggctattcgcaagggagagaaaaaagctgccactgtccccttagcattcctctgctaatcttccatttgtattgcaataagtgtgctttggcattgagtgtgttttaaagctcctgcttagctggctgggggacaagaaaaaacaaaacctcaaggacactcccactcagaggcataaaaaaataaacagttgtttctgcttttgagaagaagtcacatgcatgtggctggcattctcaggtgggcaaaggagagtgctcggtagcacctgccccaaaccctccgttctcccctttttaggtcagaagagattctgctttcctatcttgtctccagttttcactcttagtccgtattttccctccccttttccactctgtccttaactcctctttccctctttcatcgttttcctttatttttcatctctttctttattccttctcaagggtttgccggtggttttgctaggcaatactgagcttcaaggccattgtcatggaagtttccagtcctgggatgtgcttagaccagcctttaactatgcatcctcaaaacagctggcagcctaatcaaaccttattttttttctctttgtgagagaggtgaagaagatgataacatgaaatgaaatctagggcctttagaaagagtcagcaaaccaggcgcagtggctcacatccataatcccaacactttgggaggctgacgtggggatcacttgaggctaggagttcaagaccaggctgggcaacatagcaagaccccatctcttatatatatatatatatatatatatatatatatatatatatatttagctgggcatgatggtaagcaaccatagtcctggtcactcaggaggctaaggcaggcggattgctcaagctcaggagtttgaggcttcagtgtgctgtcattgtgccactgcactccagcttgtgtgacagagtaagaccctgtctctaaaaaggaaaaaaaaaaaaaaagagttaccggttatacatttttgagaggagcaatggggaaatgcaatcatggggtaataataatcaggacaagagcaggggtatgtactgtcccccaccctgctgccctaaatgcgaggaagaagccacgttgctggacccataatgagaagcttcagaaggttgatagagagtgctgatcttgaagacatttagtctgggacacagactacatatcagcatgtcaaacatatcagcttgcttgaatgaatgagtgaatgaatgaatgagtgaatgaaaagtggtgaaggaagaagatggttgggtttgggagaagaatatgcctgaaagatatacaaccaccggggagtctgtcttgtctttacagacacttaactcaggaacagacttgctggttgtcttgagtgtgaagtgcaaaaagtaaaaatggccctcaacaaaaatataagtcaggcctgtgttagagatgtcaaagatgaagacctttatgatgatccatttccacttaatgaatagcgtcttagtccattttgtgttgctataatggaataattgtggctggggaatttataaagaaaagaagttcatttggttcatggttctgcaggctgtacaagaagcatgacactggcatctgcatctggtgagggcctctctctcttgcttcctctctggccatgtgatctctggccagagaggaagcaagaaagaggaggaggtgccaggctctctaggggaactaatagagtgagaattcattcacccccgagggagagtattaatctgttcaagggtgacctgcacctatgcctcaaacactgcccattgggctccaccttaaacattggggagcaaatcttaactttagctttggaggggccaagtatctaaaccatagcagagtctctttgtgatgatcttgagatgaaattgtttgggccttggttcctgagaggggtcttgccttattcagcagtcatatttttttctagataaaattcttactatcctttagacctggggagagcccgtgtatgaaaaacagaacacaaagctgaactttaaataggaaaaagctagcaaagggactacctctgggggcactacttgagcctgtaagcagtggttataggagatctgagagtacgggggtcctagagacaggtcagttcttagggtggggcaggatataagaaagggagagtgaggaaggctcagaagatgaggtttgaacacttggccaccattttgcctgggatcatcaggggaagctcctgatatgggaacatcactcccaggcaggacaccaagaggcaaaggccagtgtgctctatttagtaagaaggtaagataagggccagtgtgataagtgcatggagccccatgggcatccaattaataaaacagtgatggaccactacaatttaaagtcctttcttagatgagctaggcaaaaggttctaattagagatacctgtcttcccctcttttccctataatgcatccaaagatctcaggtgtaatagatttgcagcttgtgctaagtagttggccagagtgtgctggcttctgtgacctacgtctctgagcggcccgagctgtctgttggtgttatcctgagctcgttgtgggaaggcggctggagcagggtgtgctgcccatctgtggctccatcagtttccataaggcttcagcttgatcagtgcagcacgaactgtggcatgtttggggcttgggagattgacagccccccaaaaagccctcaaaacatggtcaagaggacaaacgagaatgatagacatatcttcactattgccagcctattaacctattacaaactctgtttttagagattagccattagtttttccttccaaaattattatgctgttgtcatttcctccacaaactgagatatgcctggtgaaatgacttaatttaaaaagtaatttagattatattttaaagaataaatattttcttcaaacttatctgattttcaaacgatcatgactttaattttgctctagtaatgcactttctgagaataaatgggaatctcagttttgtaatatgtacccgcatttttcttcttacagctattgggggtgcactgttggggatgtggtgggggctggacctgtgtggaatagggcagatactgtgtgcgggtctccacttctcaaaggagcttcaaagctgactgcactcattgatgcagcgagcccagggccttgtgatgttccctttcttgttggttggtgctggaaagtctagagtcacagactccttttggactaggctacaaatgcatatatactttgcagagcattgcctattagtcgccattctctcctcagagtgtaggcaggttccgagggcagcacctaatgtgggaagagagaatagaaggttctggggaaggggacccactctgggcagagggagaaggatagggaggtggtttggggaagaatcacaattatccttactttaattaatacatttccttggatggcaccaacagtgaacacagccacacgctcttctgcccatagtgctaagtgggttctctctttgactagaattgtgtcgttgatgtggaagtgcagttgaattcaaacgatctgtagctggtggcttttattcctgaagttcaaatatagacaaccctcttagcaggttctaccatagttagccaaccatgtgttaatctccgcctctttgtcttctgtcttaaaggaagtcaggccaccctaaatcgcggcctctcatgtgtgcctgactgtggagagtgtgattttccagcagtctctgggtctctataatgtttgaatttgcctttggggtgcatgcgtgtggtatgtgtggcatgtggggtcaggggtggtgagaccagctctgaattgtttccagggcagcttggtggcaccctggccagatcctgcatgtgacatttcccaacaactctttctggtctgtgtctcacctgtcataattcaaaggagagccatggactgtgtgcgctagattcaccttcagagactggagagtcccatctctgtaccacagtggacacctggacttcctctggctttctcttggggactctgccaggcagaggccctcagccgtgcactgggacagttctgtgggcagtggcaggaagccttcagtcggtgaacagcgtgaagacagcctgatgcatgcaaggcgtggggatgtgattgtgtgagcagatcaatacctatatctcaaaaatgagaactttcactttagtacttgatcacttaccctattgaattatgtaagtacttcagtctcttcaacattggctttctttcattctttgtttttttaatctcccatcttagtaatgaaaaaaaatgtatgtgtcatgtggttcttttgtaaggttatttctctccatttgcttgaaaactttcttattactcctaactccttttattgatttaatgaaaccaaatgctcctgaaagtttgaccctgatctagtgatacctgcactctctaggtccctaaaagaccccacagtctgatgctttggctgcagatggagtcacagagatgattcagctttaaagtgtctacatcatagattggaaaatgcctttctagggctgaagttgtagctgtttcctagacttctgtttattttccatttctttacccactcctgtttgaaattctgctgttgtttgcatactgtttgcctttgtgtccctctttccatctgttcttaaaaaaaaaaaatcaactgagttttattttaaaccaatccagatgacaggcacacagtcttcacaatgctttggaaaccagttgaagaaaattctcgttaaattactcatccacccaactcattttccatacatgatctattgttggggtgcctgcctgttttcaagataagtgcatatttcagaggcaggttccttttaccccagataagcaattatttaagaaattggctttgacatacattttcagttttaatttttccttttacattctgaaataatctctggttgcatgtagcttcccactactgcatataaagatgtattccaggcatccgtcaggagtttgtctattccatgaagaagacattgctgtggaagaagatggtgggaggcctgatgtcctttctgtgcagccctgcaagggccttcacctccagggcctaatctcacaagcaccgactctgcactcagatttccgacaagaacttccgctgtaaagtggccatgttaaggagaccttgggaagaacaaacccattatctgatattgagtcactatgaaagatttgggagtctttcccattagtgccccggtaagagaggcacaagaggatcatgcaaggctactaatctccatttcaaagccaagaagaggtcatcgatttatagtagggctgcagatcagaagcaaagcggacttcagcctgatagcagtcaaaagacttgtgtttcagcccctttctatgatgtcctttgactagcgccccttcctgtgtccctcccctgcattccatagcattgggtcttctacaagggaccaattagtgatttgaaaaccaaagtgaatagagtacttataaaatctggtggtgcactcacaggaggaaatgagttgggagggtttaggaattgtaaggacaagtttactaatgagaaggcaggttaggaatatccttaaggaaaatgcagatgacaaatttccagctatcaaggaaaacgggttcaacctcataattagatcattcccgcagagccaaggaactgcaaaacacatggatcttcactgccatgggagactgactctaagaagagaaagttgtcagaggggttctgtgtggaaaatgtaattggaatccccaaattatgacttctatcattggaagagggcatcttaaataatttttttttttgagacagagtctttctctattgcccaggctgaatgctgaagtgcagtggtgtgatcttggctcactgcaacctctgcctcccaggttcaagcaactctcctgcctcggcctctgagtagctgggactacaggcatgcaccaccacgcccagctattttttttatttttggtagagatggagtttcactatgttggccaggcttgtcttgaactcctaaccttaggtgatccacctgcctgtcggcctcccaaagtgctgggattacaggtgtgagctaccgtgtctggccttaaataatcttttattttttatttttgagaaaaagtctcactctgtcaccaggctggagtgcagtggcacgttcttggctcactgaaacctctgcctcctgggttcaagcgattctcctgcctcagtcccccgagtagctgggactacaggcgcacaccaccacgcccaactattttatttttattttttagtaaagatggggtttcaccatgttggccagggtggtctcgatctcttgacctcctgatctgcccacctcggcctctcaaaatgctgagattataggtgtgagccaccgcgcccagccaatattcttaaatagtgatgttcaaacacatggcctggccaaagacttcctaactcactctcattgatttttgtcccttccattcaaaaacacttgttttcatagtcctgtgcttcaaaacgataaaacaatttaaccctgtattaaccatctgaattattaagaataccaggctgggcgtggtggctcacgcctgtaatcccagcactttgggaggccgaggtgggcggatcacgaggtcaggagatcgagaccatcctggttaacatggtgaaaccccgtatctaccaaaaatacaaaaaattagccaggcgtggtggcgggtgcctgtaatcccagctactcgggaggctgaggcaggagaatggcgtgaactggagaggcggagcttgcagtgagccgagatcgcgccactacactccagctctagcctgggtgacagagtgagactccgtctcaaaaaaaaaaaaaaaaaaagaataccatagcattaagtgagataccaatgaagacatgaaaaaaatctccatcagaaactagggtggagacatcgtaagccctcaggatccaggcagagcatcatcaggatgtggccatctggttctctgccaaccttatgctgtcctctcacttgtccaacccatggatatcaacattgatagaaaaatcaatctctatctttgtaaaatctgccctgtctgtggcaagctgaatttttattaagctgtaatgtttggagtagatgatccaggatgctatggtcagtgatggggagaggagaagactctgcagctgaacctgtggggatgtgagccaccagcccccagccctggtgagtgaaggccacctgtcagctgagtaaggggacatgagccaccagcccccggccctggtgagtgaaggccacttgtcagccgagtgttagacagccaggggctcctcatcctgctgcctgggcgctctggcaatgtctgctgctgtaaggatggccagctgcctaccaaggtttgaaatcatgagcagtattgaccaccccttgggtacttgggcaattcacttccctggccttgacctcacttccctggccttgacctcactgttttctcatctgtaaatgagaaaaagagttgagatgatctataaatttccctctaacacatctaggtctgtcattacttaaacatattagtttgaaggaactaaactgtactccctctgaattaccaagtacaaggctccatggtcattttcactctcctgtctggtgacagcaggtgtggcttggctttgctcttctccttccttccaactttctcctaaggtctataatggacaacttagatcattcacaattcccccacacagtttggcttgggaattggggccacaaataaagaggacaaaagagggaaaaagcataaagcaaactgtaccagaaggtatgtgaatggcgaggacacgttggctaatggggccatggtgtagcccattaactcagcttcctaggaatgctcttgaactagtttctatttggaaatgactgataaatgtgggctgaaaaggcccgagagccccaaaatacagcaaggacactctgaaggaccccctctgatatacttgggatgtgtgtccctgcccaaatctcatgttgaaatgtaatcttcagtgttggaggtagggacctggggggaagtggttggatcatgagggtggatccttcatgaatagtttagcactatcccccgcattgtactgtcctcacgatagtgagttctcatgagatctggtcatttaacagtgtgtggcacctccccgcttgctctcttgctcctgcttttgtcatgtgatgtgcctggcctctttttgccttctgccatgaatgtaagcttcctgaggcctccccagaaaccaaggagatgccagcctcatgctgactgtaaagcctgcagaacaataaaccaattaaacctctctttttaatacattacccagcctcatgtatttctttatagcaatgcaaggatggcttaatacaccttcccatctcatatgtcttttaacatcttaagttcatagcaagatgtagcaacagtggctgcagcctacagagcaagcttgccttttgtagaaatggtgtaattgccactgacccgtgatagttgcaatctgggttttaaagctttgtgtctgaacactccacacgttttagcattcctgaatcctagaattcagtgctgcaaatgagtttcaagagggtttatggttttcaggggccatagcaggctgtctctgaagccacaacagaggtgggcaggctacagctggagtaatcatgactgattcttttctgctgctgcctcagtgacaggtgtgtggatttactttgtccctcccacctttctttgcttcccaccctcattgttaatggtaaagcaaaggcttagggtaatgggcagggtgtgtacagggtgcccactgctaaatggttccacctgggtggagacaggcctgatgggagccacagaagagtactgatatcatagccatccaaagggccactctggagggagagcggagagcagactggggttacatgatcagtgggtcaagtcagcagtcacaaggaaatctccccaacaagtaaagaactaaaaattagaaggggaagatttagtttaatataaggacccatttcttatcaagagctctgtgacacctaccattctcaggggtggctcacatgagcccaccttcttactgcagagaccaaccttgtacagccaggaaaatttactggatgttcacagacatctttgttgtatattcctgacataggttattgacaagcactgttacggttttgagcaccaagagaaaaaggtcatgttgtactagtgaatcaacataagtgtaatggctaaattcaatgtacaatgggactataacttacctcctttactgtttaaagaaaagtcaagatacacgcattcagaattttgtatttttatcttgttggcagagggaaaaaataagtattgatgtaatcccaccaagtaaaggttaaggtactcaagttaggctgcttgcattcaagtcctatttctggttcttactaaccagctttcaacgcaatacttgaataccatgaatttctggttcctcttcccattggtgttcagtggatgttaggtattaatgttattttaggtatactctatgagactgtatggtacagctgcccactatcagcctattggtggaacatatatgttcagatcagtttttttcctccatgtaactttgcatggttgcatttacatttaaaacaaaaaacacaactgaagaataggaatgcatgactgatgtgcatggaatcagcttatttcgactgaacagatgaaaataaaaaatgacttaatagctaaattcaaagatataaaatgagtgcatggtaaatggaaattgagtggtaagtatctcaattcatattcactgagggcaagatgaagacaaatgaactcaaattgcagcagaaaggaattaaacattaagaatcaaacttcttaacttcagaaaatagtcttttgaaatgtctgatgcaaagaaatgacactgataccttaaaacagttcattcttttattaatatttattaagcatattctatcaggcaggtgctgggctcggtgctgcagatacagtgatgaacaagacagataggcactctgactgcatggcccatagtctagttggagaggaaaacttaaaacaaagacacagacaggcaattataaattgtgacaagtgacatgaaggaaggtacaagagtgtgaaatggggcacctgaccaggctaggggcagggcacagagagaccgccctgaggaagtgacaagttcagatctgagggacaatagtaacagatggggagaaaagagcaccagaccctctgaacaagcaacctgtgcaaagactgcaaggccgcagggggttgctggcttcaagggatggagaaaagaccagtgaggtcagcagagatggggagctgagaggggtagccctgggttcaagacacaggcaggaaccagactaagcaggttcttgaagcaagtgaaggactttcatctttatataaagggcaatggaaagttgtcaatgtcattgtcattttttttaaatgccttttttactggagtgtaatatgcatgcaagaaagcacccataggggtgagctgggtgaatttcattgtgaacacatcaagcaaccagtaccaaatcaacaagcagaacattattaaccccccaaaagtcacccttagcccttccaagtcctcagcatgttccaaaggcaaccctatcctgactggtaacaacactaggttaattttgaccatttagaaactttatataaagggagtcataccatatttattctctgtgcctggcttctttcactcaacaacatgagactcatccagattgctacttatagccataaatcactgtgtgaatagaccatgatttaattatcagttttgctgttgtggacatttgggtagtgtctggctgtttggaacagtactacaggttgagtatcccttatctgaaatgcttgggatcaggagtgtttccgatttttttttttttcagattttgaaatatttatatgatacttacttgttcagcattcctaatctgaaaatctgaaacgtgaaatgctccaattagcatttcctttgagcgtcatgtcagtgttcaaaaagtttcaaattttggaacgtttcagattttgagattagggatgctcagactgtactatgagctacttgttgattctatttcacctgatcttcggtgtttttctaagagtggaatttctgggacttaaggtatacatatgttcagcactaatggatcctgccaagcagttttacaaagtggccatttcaatttgtactcccaccagcaatgcatgagagctcccttaaaaggtttgctatagccagtgatgtgatcagatctgtgcttttcaaagaccatatggcctcctgtgagcagaatgggctaaagaggcaggagtgcctggaaggacctgtgggggctgtgatggtaggtcaggcaagcagaagacagggaaaggccaggatggaaagaagtacatggacccaggagagatgggtggggaaatggctgatgggctcagggaatgttttgggtggggggcatggtgggcaggagaggggagaggtgacaagaatgaccctgttcaagacataggcaggaaacagatgggtggtctatgattggttagatggtagtgtttgaactctggagatggatcagagatggggaggtgtggatcataattctagtgcattaagagtacataatttgaggtgcattagctatgtccaagtgggaatcaaggaagcaattagatacagaggtctggactcagagtgaagtcccaatggacatgcaaactggagagtcattatagcaatatgggtgagtactatggtttgaatgtttgtgccttccaaaactcatgttgaaatttaatccccaatgtggcagtattgagagctggggcctataagaggtggttggatcatgagtgctttgcttttatgagtggattaatctattcatgaaataatgagctaatgggttatcctgtaagcgggactggtggttttataataggaagagagacctgtatgtagtatattagcatgctcagccctctcaccatgtgctaccttgagactctacagtgtccccaacagcaagaaggctctcaccagatgctgcccctcgaccttggacttttcaatctctgtaactgtaggaaataaattccttttctttataaattactcagtttcaggtattctgttatagcaataaaaaccagactaaggcaatgaggaaatgtcacctgggttgagagtagtgagaagaatgtctcattttgttatttcttagtttgagagcagttattcaaattaaagtttgaatatttaaaaaatttttgctcttgattttatttcaagttaaagcttcttaggcatgtgtttatttgtagggcagagatgataacactgttataggaccgacaggttcgtatgcccactgcacagtaatagacccattacatggagacagcaggatttgcagcagaaaaagagttaaaggtcagtgggcaccaagtagagaggggaggagaccctccaatccatcttcccaagttgttctgggttggagtttttaaggggatcatggagagcaaggcaaggtggggggggggtgaaatcatcgggatgtggaaactgtattcttgggtgggtcagctcctaagggatccctcagaccagctgagtcagccattccctcagaatgcaggacctgaaggaatatctcataggaaaaacttaacgtttcatgatgttcaaggtgttatcaatagagcagttaaggggaactgtgatctagggtctatgtgattccaagacagtaggcagcaaacaactctgaggaaggggttggagcccaggctggcctcatgattagcgccgagtgtgctgcaagctgggtttattttcctttctcccctctctttcttccctgacgaattttatttaaaaaaagtttatagggatggtttcaacaccatgctgtgggcaagagaagagagataccttgttctctgctgcagggcaccacagtcaccaagagtggactttccctggcaacagggcctctgcattggtctgcttgagctgccataaccaaagaccacaaaccgggtggcttaaagaacagacacgcattgttgcactgtcgtggaggttagaagtctgagaccaaggcgatggcaagattgcagagctctagggaaggatctgttccaggcttctctccttggcttgtaggtggccgtcttctccctctgtctcttctcatggtcttccctctgtatctgtattagtgtccaaatttctcctttttattagaacccagtcatattggattagggcccactctaatgatcctgtttgaactctgattacctctgtaaagaccctatccccaaataagttcccattctgaggtcccaggggttaaggtctccaacagaccttttatggaggggggcacataattcaacccatccacactcccagccagggtcccgcttcaagacgagcacttcctcttccttcaccatgcactggggcaggtgactctaactagtgcccatttcgtgtctcattctggaaactatgccgatcagtcaaagtttccagagccagtgaaatgttctcatcacacgaggcttctgaacacccagaaattttgaagcaagaacatgacaataatcatcactctcattcactgtgtgccatgtccttgcaagttcacagctagcccttacaacagcctgcacaggtctgattttccactctgcttcattgatgagcatctgagacgcgggagcataagggaacttgcttgaggtcacatgcttggtcggtagagactcagggtctgcgcccaggcttgccagcccatctccactcctccctgctgtgggcccagggcacagcggccacaggaggacttggctcttctttcaggctttgcgggcacagattagctagacagagtaaatatgggcatagcgattgttaacggctaacttttgggtgaatgcactattcttgccatctcaggctgatttatttgcagcactggtagtcagggtccctatagcaagggaagagataatctctaaatattccctggagccatgagaaacggccaggtaaagaagcatccttctttcagctggaacacggcgatgttttctgtcacctcaaatgaggtgatctccagaatcccctcaatcctgtctcattcattcaggcacaaaaaaggagaaacgtagttgacaggaattagatttggaaatctttcagagaaaatgtgtttgatttttctgtcccacacctcagcagtttatttcacactgcgcttattggtctctttgtctcacttctccttacataaatcctctgggtgtcgtttgaataatcaaaacgtattagatatgaaacataatgtgtatcatgttgcatcatgctactgtacctgcatgttgtaatttgtaccttatttgctgtctatgcaatgaaaaggctttcaagtttttaggtcagaaaggtttaatcactgtccctagtcaggtttgcagcacagagccaaatggatggtgtgcatttggacctgcccttggaagtcaggctgtgattagctagggcaaaagtttccttatctaggtgtgaacgtggaatggcctgaaatgtgtggacagtctattatgtgttcatcactgtgcataatgatgggcctgtagggatgtctatgacacgcaggatacagggctgggcacctggttgttggtatcagatatgtaggagaagaaggaatgggtgggggttggagagaacacaagcacaagcataagacggttctgctcccaagaggctcattcgtcactcagtgctgtagacacacgggagctgccttagcacagagcgacagatgccatgagacaggcgcccactgctgatgtgggcagaaagagatgtgcaagcgaagggcaacagatttggttgctgagattaataagaggaatcaagaaatgctcccaagagaaaaatgatacttaatctgggtcttgaataaccattcattcattcattcattcttctttctctctataatattaattagatttctgctaataagtacctagaaatgttctaggtgtaggaaattcagcaatgaacaaaaaaaacccaaccctccccccagcaaccccttgccgtcgggagctcacattcctataggtaagtggtagtggtgtggagaggggctggcctagtgaaaggaacagtgccagctgttgcacagggacttgtgatgaggttggtgtgagtgggtggccatgtggggcaggtcagagaggaggcatcgagttgccaggtgctgggtcccacatgaggagtctgtgtgccaagccaaagagctttctcctgaaggcctcaaggggccactattggtctcagcaaggtgggaggtcatattgtcagacttgtgctgggcaggtgggtgcaggttagaggcaggtgaggccacaggcagggagcctgaggcctggtgagagctggtgagagaaattcaaggtaaggatgaggatttcaggatgagtctcacttgctggcttctctaactacatggggatggtgcaattgactgagggtaggatagaggaaaaggatcaggtgcaggagaaacatgatgcgttcagggttagccaccttgcttgtgaattctagaattctgccagcctcacctgagagcccctcagaagtaagaggggcttcttactgtggaggaagtgtcagaatgccaaccaaagatggccagctaaataaatgacatgcctggtggtctgacatgacaaatcctgagggtcccttgcccagggtgggtggcaggggaatggcagttcacattcaagatctaagttttgagagataagaatcatctcctttggggtggggcagctgcattccacactcgggacccggccactcagtgcggggtgatggtgcagttcccagggactgatgtacctgctctgcagtggcaacctccgagtgtgagagaacccagctcttttttggacaattttgcatctgactcattgttggtatttgataacatttgttatgctaatataacaaatacaataacaggaaaatcagaaaatccatgtgtactcaatgtttagctcccacttataagcgagaacgtgcagtatttggttttctgttactgcattaatttgcttaggataatggcttccagctccatccatgctgctacaaaggaaatgatttccttctttttttgtggctgtgtagtataccatggtgtatttgtaccacattttctttatccagtctgcccatggatgggcatttaggttgatttcatgtctttgttattgtgaatagtgctgcaatgaacatacgcgtgcatgtgactttatgatgaaacaatttatcttccttcgggtgtataagaacaatagacgctggggcctacttgagattggagggtgggaggagggtaaggattgaaaaaccacccattgggcactatacttgttacctgggtgatgaaataacctctacaccaaaccttcatgacatgaaatttacccatacaacaaatcatacatggacctccgaacctaaaataaaagatggaaaaaaaaaaaaagaaaaccagaatataatctgagttctgtctttgtgtgatccggttttacaggaggaattaacctgggatgggggaaagaatgcatttagtgctggaatatataaggagaggctttcctttgtcccctcctctcttctctctcccccaggattttttgtccttccgtgttccacctgatccatggccaactggctttagaagttgttattaatagttcaccatgctcattttcatgaaacagagggaaaggcagcctcttcatttgatgtctagttagcaaaccagaggtttgacaccagctggtcataacagacatttttaataaaacttacctccaagttaaaataaaaatgctgccttagagattttgtcctgaaacatacgaaaaaatgacaggtgggatctctcatgcaaaacttctgctagggctaaaggaaaatatctgataaggttgtttgcccatgggggaaggattaattggattttctgtcttgcccctagtgtctgaccctctgttattatgacaggaccacagaagttttgaacgctgaatcatagtttatagttttagcatttttgagctatggagataagagtgagggaaggagtgtgataggggagtgagttcccacaatactccggtgatagttattgtctgcctgaaaatgtgaatacatatattcaagcccgatgtagcctgttcgaagcaacccagccgggcaatgaaagcctcagctgaagatcataggattaaatccaggctcccctctttcaagtaccttctcatgctactgcatttatgtgggtagtctgggattatgtctgtggtttgtttcactattttctggatcacttctgaaccagtccgtgtgtcagtcctgtggatatgcatttcatgaatgagactctgaggaattttctaatagtgtctatggtggcagtgggaaaaggggaggaggcagagaaagaggtggtagcaagagaaagaactgtgtggagctcgagctaaaagcaggagctaagactgcaagatcaaatgattcccactcagttgtcctagtctctgtctttgttttctgtggccataacagaacaccatagatttggtaatttataaagagcagaaacatatttcctcatcattctggagactgggaagttcaagatcaagggctggctcaacagaaggcctcttgctgcatcatgccatggcagaaggtggaaaggcagagagggcaagagaaagcaagcaagggggggccaagttgtccttttctaatgaaccccctcccacagtaacggcgttaatccattctagagggtggtgcccccatgacccaaacacctcccattaggccccacctcctaacactgccacattggggatcagatttccaacacattaactttggggacacattgaaaccatagcactcccctatagcaatgagtaatatccgcatagtgattttacttattaaataatattgacatggcttcctctttatggtttgctagtggtaaatcttcaaaactcttgggtagtttctgtggatataaattccaggtgaggttagttgttaaggaaagaatttccatgaaagaaaaacgtgtctgagttttgaataaggaaagacatacattgtgggtaactgaaatgccattttttcactcctccttcccccaggctctaaataccattgctgaattgaatccgtccagtttgcacgtgtgtctacagacatgtgtcttatggaatacaaacaatatgtgcttcttcttaaggttttgttactttgtcccttggtggtaagttttacaaaatgatttgaaatactcagcgctcaactccaaaagccaataaaacaggaggaagacattgggtatgatttggaaataagcaaaacagaacagacctgactttctttctctttcttcctttcttccttccttcctttctttctttctttctttctttctttctttctttctttctttctttctttctttctttctttctttccttctttcttttctttctttcttttctttcctttttttttttttgaaatggagtcttgctctatcacctaggctggagtgcagtggcgccatctcagctcactgtaagctctacctcccgagttcaagcgattctcctgcctcagcctcccgagtacctgggactataggtgtgcatcaccatgcacagctaatttttgtatttttagtagatgcagaatttcaccatgttggccaggatggtctcgatctcttgacctcgtgatccacccacctcagcctcccaaagtgctgggattacaggcgtgagccaccgtgcctggcccagacctgactacttgctagtataattttattttaagtgcacgttattattctgctttctccaatatcagacagctggttccttcttgaagcaactcttaaagacagatggaccagccatgtcttcaaagtgttggcttcttctgtggctcccattttcccgtttatcctagtgccttgacttcttcacttgccaacctctgttctccctggcaccaaggagttatgtagcgttgacttgttcttttccatttgaaggtggaaggatgaacataaggtgccagactgggctatttcatcatagacagatggatttgctccattcatgtaaagagttccttttgtagaatatctgaatcctggtatatcctttagatggatgtataatccctatccccacacttttctcccaaacttgtgagttataccattaagtctacaggactgggcagttacgacctggacattagtccagttttctgtattctactacaaaaacttgtttctgttgtttaaaacatgggattatttgtaagttatcactccagaaatgaacgtaactgaatttgctgaggatttaaactaattacctgacatcaaattggttcaaggaagtggggaaaataaagcaaggattgacaactactatttgcttcattctaattttaggccctttaactttaaaggtgaattattccttgttttattcttggagtatttattttatgaatacgtgaattacaataacaaaacactataccgttgtgaaagtgagtgagctacagctacacacaccaacatggataaatctcctataaatctcatcatgtcagcgagcaaagcaagttccagaagaatgcccacagtatgagaccaattatttggtttgaaaatatgcaaagcagcattccatatgtcttaaggacacatacatatgaagggaaaggataaatccatgatgggagtgataatcccctaaaaatagttacttgtgggggaagcagtggagcagaatgcaatctgggaagggtactgagggagttcttatgcgatagtggacagggatggatttatgagtcaagaagagcaactgcacggcgtctggaaggcgtgctggccctgggctctcaggtggaggctgtttgcatgatcagcagataggaaggtaccatggatgcaggagtggtctgaataccagaggaggcaagccaagtgagcaaggggagggagacgagaggtgccaggaaaaccctgtctcatgagaagatgatgatcctagaaggcttagaagagtgtccaccccaggccaggtgcggtggctcacacctgtaatcccagcactttgggaggccgaggggggtggatcatgaggtcaggagctcctggctaacacggtgaaaccccatctctactaaaaatacaaaaacaaaattagccgggcatggtggcgggcacctgtagtcccagctactcggtggctgaggtgggagaatggcatgaagccgggaggtggagcttgcagtgagccaagatcgtgccactgcagtccagcctgggcgacagagtgaggctctgtctccaaaaaaaaaaaaaaaaaaaaaaagagtgtccaccccagtgcccccatccacagggctgctgctgctgagcacccatgcccttgggtgacccactctcctgctcaggggcccagaggatgcttctttcttcttcctgggcactttcccctgagttttggtttaaaagatagaattcccgatgaagccagcttgctgcagtcctgtagccccacatctccatatgcgatcctttgagggaggctgagcatccctgcatctctgaatgggagacatgtttccaccttggctcctgggggcactggggccattttcctggtgttctgagcactctttctgcagaagaagacactctcagatggtagattttgtggatttcagtaagtagagtccttcaggagtctctaggcagaaagcacctgagttgacagcaagaactgagagttctgggtctgcctctagatggctgtttgcctattccagcctcactgtccccatatccagatggaatgacatgagcatatgggcaggacaagccacctttgtccataaggcggggtacacgccaccaagactaagactgaagcctaggcaagacttagagtatttgtggcttcagagaaacatcaaattgagaggaagatcgagtgataggaaaactgaagccagagaagtaagtattttgtatgtagagtatcattttccaatcatcgctggtgtgataaaacagcaaacgtcactgcttattgaaagcaactagacagtatgtttggtgattggattacaagttttccttttagataaggagagatttaatctgtttctggactctttaggagcacccttcccagttttacagttgagggactggagaccctgagaggtgaaggggcctggctgcactcacagtggaagtgatcccactggatctcagatgttgagtttctgacactcaatctagagctcttcttaccacacatgcttcagtctacacagttctccccctctttttttttcatcttctcatctactgcccttattctctctctctctctctctgtaaaacatgtaggggctgtcatagacgacactgtgtgagcggaagttgatgacttcaattgtgacaaatatcaggagctcctctcaaaaattaccttcacaaaagccttttagaaaagccatgttgctgtcacatgtagctataatttgggttgtgctcaaaagacttaaattggttaataccgaagggaggtgtggtttattctgtatttgttgttctagtacttcttgggtttgggggctgctgttatgagaaatggcttctcctagactccagaatgtgcttagagagtgtttttctctttgaattgctaaaaatgttatttcctctctcctggatttttcaaggtgtgcaataagttgtgtagttgctgctctgctgcacagagctttaatataaactgcgtattttcactctgtatgtgtgagtaatctgtgccttctatggctctgatcgtgggtaagcaaaaaacacagtgactgctgaaatatagggatggaaatttctttgtcagtaaagatcctatgaaatcatatactgagcatacgtaaaatatggaattgtctctgcagtattgatcgagcacaaatccactttcgtaaagcaaaaataaaggtcaaacagaaaaggcacatcactggtttttaaaattttttgaataataagtacttgaaattccttaaaaatgacactatatatgatttaacttagatagctagaatagtcaaatacatagaaacagaaagtagaatgcttattgccaggggctccagccctggtgagggaggaatggggagttaagtgtaataggtgctgggttttagagatgttgacaaagttctgaagatagatggtggtgatggttgcacagtagtgtgtgggtatacttgattccaataaactgtacacttaaaatggttaaagtggtaaattttatgtaatgtatatttaattgcaataaaaaggataaataaatgataccatatcctcgtgatttcagatacatctcttacttactgatcattcctcctgagaatgtgttctgtctccatgctgattatgtttcctgttctcttcctttgggtgctgtgttcagcatttttaatttttttaatagttaatgctatgctcacattttcctcccgtgacaaagagtgggaataagcgtggcacatgtgtctctcaccatctgtttgatagctgcacagaagccttaggaaactgagggatagacacgctcccactgagttactcaacactgctgcttccttgtcctctggctgaaggctaaaccctgccttctactgtttacaacaggagtgtccaatctttcggcttccctgggccacacttgaaggaggagaattgtcttgggccacacataaaatacactaacactaacaatagctgatgagctaaaaaagaaaattgcaaaaaaaaaatctcataatattttaagaaagtttacgaatttgtattgggccacattcaaagccatcctgggctgcatacagcctctgggttggacaagcttggtctaacatatagtgttaataggatatttgaggtggagtaagaccaatagatcaggaggtaattgccactgaaaacatagttaattactcacagatcctgtgtcatgccacgtgaggaagcaccagggtgggtcaggagacagacggagcagggaaataaggtcaagagactttattgtggtttctgcaggaaggaatgctgagagagagcaagcccattgaggactgggtagtttgaataattccagtgggctctgggatgtaggggctgcccctagttgtttggtacctggtctggggtgattagggcaggggatagtggtcctgagtgtaagatcccaataagaggagttgttgggtggtgtgggcgtcacctgctgttccattggcctttagccagggcctgagagctgggtcaagataacataatttaaaaaacgatattatacccaccagactatttcttcctggtagaaagcaccacagatccatatggacttggatggatctgtggacagattccatgtttgagaagtagccataacctgcggccttcccctttctacaatgcagactccatcctcagttcaacagaagtttcacaggtatctttacaggtgtttcctgagtcagccgatcaggtgaattgtttgaccccattgccaagaatatttctggctggaggttccgaatacctcaaagagaaagtccctgcttgaaagagtctcctgcccccccaccaccttagaacagttgctggcattgattgctctaccaagagaaaaatgctgatacttgacaaactattgacacacctgggaatggccacataatgttggataatgttaatgccacaggtggaggacgtgggtgtcaggaagaagaagcagtatatgattccacaacagtaatttcattcttcaagaagattgattctattgggaatgatttttcccattaagcatgaaacacagagaattcttggtggatccattcatttagcaagcagttttgtggaagacagcatgtatgactgccaagggtgtggggtgtggtgtccaagtagtgccttcatggctccctcacttataaactgtgtccttgagtaaactgctgaaccctgtggtgccttggtgtcctcaccaataaaatagaggtaaagatacaagctcactggtttcctgtgaggactaaagaacacctgtgaaaagattattaactatgttagagaggagggtgatgatactaattggaaacaaataaggtactaaaacaagtgagacgtgatcttcactctgatggaatccagtgggggaaatgaatataaaaacaggcaattataaaaaaaaaaatggtaagtctgctgatatggagtacactttctaggggcatcaggatagacaaacatagaagaaaaataatatttgatttgagccttaatggataaataaataaataaataacggggagaaagatgattcctagagtagggagtatctcatgcaaatgactgagaagcttgattaagttaatgtttaagaatgtggcaggccaggtatagtggctcatacctgtaatccaagcactttgggaggccgactcaggtggatcacctgtggtcaggagttcaagactagcctggccaaaatggcgaaaccctatctctactaaaaaatacaaaaattagccaggcatggtggctggtgcctgtagttccagctactcaggaggttgaggtaggagaattgcttaggctcaggtggttgaagctgcagttagctgtgttcatgtcactgcactcctgcctgggtgacacagcaagaccaccatctcaaaaacaaaaacaaaaaacaatgtggcatattaaaaattaaaatcacaataaaatcagagggtacattgtgagaagttaatagcaggagataaggttgaaaaaaaaacttgaacccaggtttaaaagaccttggatcatgtgtatatgtgcggttaataaaattcgatagtctagaaagctttaaatgcaatataaagaggactatcttagttgagcaggcacttattaaaattctcagcataaaataacagagtataggacagaaaattatcttggaaatttaataaaaggttatatattagtcagctcctgctttgataatgtagtataacaaacagcccccaaatctcagttgtttatatgaaagcatgtatttcttgctcatggacttgtgcgtcatcttgtggctttgccatgtgtttgtgggttgggtcagatctactttgagtaattctgggactgggctacctgcggggcatgctattctcatggtagactggaggaaggaagatagataggaagacaatcatacaagggcatataaagcctctgggtgggcgtggcatacgttaggaccactggtgttccattggcaaatgcaagtcacctggtcacatccagaggcatggggagatgacgcttactctgcctgtactgaagagaaaggagagaaggaggacttatgaacaatgaatacaatctaccactgatggtcattaatggcctcaaaaatatcacaaagacatgaaagccctgcagtggcttccaaggatcttcttattagaaatgatatgagggatagagcagtttaccacataccacaaacgtgtataccagcatgtgtatactagtttgggaattcgtagttttgagtatggaagtatgggaagtgaaaagaagggagaagtagaagtgttgggtgtggtattgcatacactggctggagacaggaagaaacaacgatcttctaatataaactttaaaatggtcccagagtaaagatataatagtgatcagagatttcactccatgaacatatgaatgtctaatttgtctcttgatatttaacttttaacatgaaatatttcagaaatatagaaaggtacagaaaaaaacatagtggacacccatgtatagtagatgctaacattttaccacatttgattcaagtgaacctatgagtttatttttagtgttgttctttttaattaagaaaatattacagatacacaaatgttgtatattctactattctactctggattgtctttttttccctcagtgtttttgtcatacaaaaaattttaaaacttttaaataagatgactttatcttttccttcttttttttctatttcttgtttaataagttctttcctactcccaggatcatgtgaatgttttctgtattttcttctaatttaaaaagttttgttctgtagctttactttttaaaaacattttttaaagtttccatctggaatttttgatgtgtttggtgtcagagatataattttgtctttttacatatcaatcagtatctaatagcatcatgacctctacagatttgtgtgtcatctgttgtgtgtgtgtgtgtgtgtgtgtgtgtgtgtgtgcatctttttataagtccccatactcttccattgatctgtttgtttctttctgaattaataccacactataattgctatagcattagaggacattctgatatgtggtatgacagctctccctctccccatcttatcacatgcacacacacacacccacacacacacacacggactgagcatcctttgtcttcaaagttgtcatgactactaatgggaatatttaatcaatttatatttaatataatgatgaataggtttgactttaaatctactatcttgctagtggttttctatttgtcccatctgttttttttttcttttttgctcttttctgccttcctttagaactgagtattttttagtattctattttatctcttttttgaattattgttatcccactttgttttattttcctcagtggttgctttagggttcattctaggcatctttaacttgtcatagtttcctttcaaacaatattattccactttatgtgtaagtatatctaatgaataatatatttaaaatttttataatataaagcctcataaatattttatatgtatactgtcactcacacactatatatcactacatatttgtatatttcccccatatatgtatctccctcatatatatgtgtgtgtgtatatatatatatatgagagagataaataattttacaacagcatacttacatttttccctcctgtcatttgtgttacagttgtcatacttttacttccacatatgttgtaaattcagatcaataaggttttaaaaattaaattattgttttctttcctgggataaactctattattctttaccactgtgctagatttttttttttactaattcttaaagcatttttgcatccatattaataaatggaattaactgtaattttgtttcttcatactatctttccccgttttggaatcaaggctgtaccagtctcataaaataactgggaagttttccatcttcttattctccctgggcatcatcctcacctacctgaactactgcagttgcctcagaaccggttttcgccctctcatccttgtcttacagtacacctttgccccaaattcatttcctacaatgcagtgattcttctaaaatacgcatcccttcatgctgctccctggtctagaacacgtcacagttcatggcttattgtcgtagctcagtaattccttgttttctggggtttctctagcatcatacaggctgaaatggtgtcatgtgattccagaggccaaaaggctggtgtggagtcacggcaactttcctaccactacattcccccttcctatgagtttcatcgtaccaatgatggctgttcatagccgactgcatcattttccatgaaattactggtgtggtgtgatctggggtcgcattcaatgggaaagatttagggaatggtcatgagagtggcctcctggatgcagtaacctgacataccctacattttccctgaacttggggtccggggcaggcttttgcaacaggggtatggtatttaaataatcagcataaaacagctgcccattttaaagctgtctcttcatagaggtcaggacagaactctaggtatggcttctactgacagctactccttcaggagatacaaattatatgccgattctgacacttttgaaaaagaaacatatcaaatgcaacttttttttcccatttcagtttatgcttttcactgttctcccttcttctaaaaattgtggtgtttcatctttctgatgctcttctagaaagtgggctaaagcactaaaatataatcattccagtttcatagagccagacttgaggcttatagatgttgtataagtggctcagggacccaaaatatcttctgtggtgacccttgctttaaatctcagggctatgttttcttagactgtctgagcaccagtttcctcatagaatgtggcagattgaggaagattgtatctaaagcaccaacatagtgtctggcaccatgtcgttcagtaaatattatacctgtgaaatacatcaaatagaggcgccactgctgggaagtgaagtcctgcctataattgagtttaacaattccatagaagatttttttgaatactgatgtgcaaggtgactggcctcatgtcagattctgtgagtaaaacaaaggtaattgagcaatggttcccacccttctggcatcactgactgttacgggatctagaaacatacatgatcagacacgtgaacccacggggccaacaccacagcaggagtgaagaaggagctggaaggggaaggtggggattcagtttgcctggcagggcatggtaagacttcagaaaggaagtgacattggaggtacatcttgaaggatgagtgggatttcaacagacagaggctgtagggctgagcacttgaaacagagggaggacatattgcagccaaacctcggtgaactgacttgggtacgcttctgccagaataagaagaggtcttgaattaatagtcaaacctgatatagcttctttgtcactgtgtcttttccttgaaatgaatggaactttttgattttttatccttacttttctcctctctgggttacagtggcaggttgttttatcttcccctgatgaattgaccggtccagagagcatttcagttatcatttatggaacaaggccaaaatatttctttcacacatacagcgcagactaaatcgtctttttctttatcttttttttttcctttaacaacctccagcctatttgtggcatctgaaaaactttgcggcagcattttacagccatttattgtagagtctgttgctttgggctgctgtcagtgctctgacacaaagtttcccatctgattttgagctggtcaccgtgtgctgttgtagtaacagggcctcctggtgcattgaaacacctggtttacttcacacttgatcactggcatgttcaagaacagatagagctttgtctgtcatttgctctttttgggttagcttaagctagggatgttttattttaggtttttttcttaaaatcagagaaaatctagcttcaaaactcaagtgctaaaacaccaaaatagtgttatagaggcacattcctggggcaggggagaggtggccctcgattaaatatatacgagcaagtatttattgaatctcattttaaggacatttgcatttcatgagaagtgagaggtgtggttgctgccctcaagagacttataacagaactagggagaaagatacagccacattagacaaaacagcaagatgtaatcaagtgaaccaaagcagtatcacatgtacacaggagtgtgagcagagagttaaatctatgtatattcactttaggtcatttataaccttgacctccagcaaatgtttaacaatggttataataatatttcttacaattacacataataacccatccgtgcaaatgtctgtgtacttgggccctaaaaatataacatactgattctaggaagaatgcatattcttgtcactgttttcatgttcagaaggaactcaggggtgggccagttctggagtccatgcagctggacagactctggaaggtgaaggacccttgcccaggaagggctgaaatctgtgctgggcagagtgagtgaagggaaggatgttttgattgaccgaagattttctttaattgaacttgaatgggatgacaagaggagaaaaacctggacatttacttcttgaccatggaaagttttgaagtaaacagaacaccataaaacaaaatataatttgggaattgaggttgaaaatcaacaagtaaggttggaaagagttgttgaatgttctacattcacaaataactaggccgggtgtggtggctcatgcctgtaatcccagcactttgggaggctgaggcaggtggaacacttgaggccaggagctagagaccagcctggccaacatggtaaagtcccatctctactaaaaatacaaaaaattacctgggcgtggtggcgtatggctgtaatcccagctactcaggaggctgaggtatgagaatcgcttgaacccagcaggcagaggttgcagtgagccgagatgatgcaagtgcactccagcctgggtgacagagcaagactgtctaaagacaaaacaaaacaaaaaatgaaacaaaacaaaaaaaaccccacaaaaaacaaaaaaaaaagaaaccaaaccaaaagaaaaccaaatagttagatgagatggaaagagtggaggacagatcttaccaggaaatcctcagaacactgactactcagtgtggatttcccaaccagctagctacagtctgcttgtctctcctgagggttttcagactagtttccaaaaagtcaggaaaagggtagaattccaccttccgttccctatttggagctctgggacagtagctgtcacatgatagtatgcgtcagagtcacctggtgggcttgttggaaacacaggctgctgggtccctgagcttctgattcagtagtctcaggtaaggcctgagaatgtgcatttctaagacattcccaggagacacagatgctgctggtctggggaccacattctgagaaccactgcctttgggtgggtgtgggccatgacctccttccaggttctatacattggccccttggctcatcaaaagggtcttggtctatgctttgatctatgcctttccttcaatgtggctgtaagttttacctaattaaaatgctgcatctggtttggatgatctgattaatatggaggatgaaatttatagcaataagtactcagagctttgctcccttcccgatcaaagcctgaagtttgatttctttatacatatattttaataataatcatcattagtgctgaaattagagataaaatgtcccaatcatcccagtgtatttttagtttctaagcatgagcatttgattattgttttctggcgagtctgtcgtgtaatccagtaattgcaataaaagagaaaagtactttttgctaatatggtacaaatagttttgtccacagtgatcaaatacagagattttccattctatgttattttatacccctctctactcccctgcttcccaaaatagacacataatatatacaactagatttattggagcttctgatttatatgagactatataagtgatttcagtgtatctaggatagagattttgttcccagagtaaaagcttctgaagctgtgcaatgcaaataaaattattttatttattatagcattaacttaagatgcagtcttctgaatagtctagcctgtgtttgggatgtaaatttctcttgcaccctgctgcctttcacgtttgctttcagcagggactatagtttaatctttttcttcctccttgccccgcaacaggagatcgctattatcagctgacactgaagctcctaaaaaaatcttagctcagattctctttgtccatctgcaagctagcgcacattccccgttcatggaaaaataccactgcggtggagctttaagtcactgctgttctgcaagaaataaattttatcacaagaagcagtgggtgcagttagaaaaagtcatctagatctaagggaaggcttcaaataattctcctaattggcctacgtggttcactagtagaaaaacctttcgtttttgtccttcaaaaacaaaactgagagagttccctggagacattagtttgctaaatgacttgcccaaggtcacctggtaatatgaccaagtgaagaattatgggtttgtgaaccgttatattcggtataaggccatattcttttgttactttcttaggaagagaatcaatggcttgtttcagaaagctttgcaaggaatcacttactcttctgccatgggaaaaattgtgtatgccagatgcattttgttcatttttaaagagctcctcaatgctattgctgatctcctagggtaagagaaggacagggaggttagacaaggcaactggtagtcttctaatgcctacagtaattaatgataatattcagactagtttcattcatcaaagcgtatacattacagggtttgaaaaataggcgtattttcttagatgcaacaaaatctactctagctgctgcctcagggtgctcattaccacctttctagtctgccatgggtttggttgtggggcagaagtcagccacatacagaacctcaatggcaaggcaatatgggaagtgcagtcctttgctttaagtctctagtgtagagaaaacatgttttgggggtggaatggtagactggagtgggtttgaataaaccaattggcagtaactgctgcagatagttctcaaatgttattgcttccaatggggtgaactaagtcatgcagtgagccaattctcttgcaaatggctggcctgtcttcaaacggctatcagagaaacgtcaatttcagaatatggttagatacagtgtatggggataattagtagatgtcataatgctatgcaatggtattattcttatttagaaacgaaaattgagtaaatttaattttagaacattctaatttcaccaattttgcttgtccataatttccttaaaatttgctcttagatgacagcatggtgcatggcaaatgcaggctttgcaaacaattagaaccaagttcatatctcagggttgcttcttcttagctacctaattggggtatgtcactaaatctcattaattctcactggagaggatgctgatattgaagcgtactgggagcattcggcccatgaagctctgtgcacctttaatgaaatcaggcttgtatggcacactgcagacactgacaaattgtgtggtagttattctgcttctgacccaaatgcaatgatgccatcatcttctgatcccattttttcttgttcactggcacatttactttccaaactgtactttattattatatatttaatcatgcagtgtattgctttaatattgttcataggttatctcctgtttattttgtttctcagagtgactagaatctctctctgtcagaagagagggtgtgacttcttgctgcctttgccttgtatcttatcctgaattctgattctaaccttagtgcttgcatcagttgttatggacctggatcagggccactgtgtatggttgttcaggttgaacagtgaacaagagccccacgtttcatgggataccagtcactttgaatatttattatatttatcatatacataattattaaacatattatatttattatacatattaggtcttgtcctcataaaatcagtacattatggcaactttttaacaaaaagaagtgaagtgtcttaaagaggggcactgcctcttgactggcacagatgcaacgtatgggcaccacagaggctagcagtggccctggataagttgatgatcatagtgggtgatagcataggtttttaaagttgttcacttattcatatgacaattatttgtttttgtgcatattatgtaacaggcagtattctaggtagttggatatacaattattattataaaaataataatcactatatgggaggccgaggtgggcagatcatctgatgtcaggagttcaagatcagtctggccaacatgatgaaaccccatctctactaaaaatacaaaaattagccaggtgtggtggtgcatgcttgtagttccagctactcgggaggctgaggcaggagaatcacttgaacccagcagaatgaggttgcagtgagccaaattcacgccactgcactccagcttgggtgacagagtgagattctgtctcaaaaaaaaaacaaaactcattatcttagtgtcctggggctgccatgataaattactacaaagagaaatgtattttctcacagttttagagggcagaagtctgaaatcgaggtgttgttagagcggtcctagctccaggttgtaggctttgatttgtcagtccttgatatgtacacgttgagtatccctgtctaaatctctgcgatctgaaatgctccaaagtctgaaactttttgaacaccaacatgatgctcaaataaagtgctcattggagcattttaaatctgaaacactttggttgcaagcattttgaatgaaggatgctgagcctgtatacatatcatagcaatctctgtctccattgtgtgttccctccctgtgtatcactgtgtctttgtatctcttcttcttctccttctcctctctcttcctcctcctcctcttcctcctccaccttttctctctctcatttttttttttttgacagagtcatactctcttgcctaggctggagtgcagtggtgcaatcatagctcactgtagcctcaaactcttgggctcaagtgatcctcccacctcagcctcctaaagtgctggggttacagacatgagccatgatgcctggcccatttttcttcttaggtggataccagtcatcagatttagagcctcccctaatccagtatgacctcctcttaatgaatgttatgtgtgaagacctcccttatttccagataaggtcaccctcacacgtactaggagttaggacttcaacaatttaacccattataatcaaagagcctataagactgtagatttacatggagtaaggcaggcaaataaatgagcaataaatatataatatgtgaaaaaatataccatgtgtgagtgattacaagtgctaggaagaaacatcaacctcaagccataggattgcctgtgtggggaggctctattctaggctgtgtggtcagagaaggcctttctgagaaggtgccattggagcagaggcctccgcaaaagcagcagacgaacagtgtggatttatggggagggatgttccaggcagagggagcctcaaggcctttaggccacagtgtgttgggcatctgtgaggagctgctaggaggctcaagtgaaacttggagagaggagggctgggaaagtgagaacagcaaagaaaagggcaacagatcatgtggggttgagtataataggaggttagaaacttggtgattaagatgggaaaccatttcagagtttttaacagaagagtcacgtgatctgactcgtgtttagaagattgttctgttgctgcagtcaagagactatagagagtcaggctgggcacagaagaaactgcaaaagcagttactgctttggagcaggaaaggggtggtgtggttcaggcagcatgggagccaggacactggccctgcagggagtgaatttcaaggttaagtagcctggaagctcagtcctctctcttcaatgatccatgcttctgtcctggttcttcatctatcttcatctatggcacctttgaggtaggtattgagttggaggctttgctcatcctgtgggtgcaggtttggcagcccagaaattatttttaggattaacagctacatgttgttccaggccagacttcctctaacattacatttccctcaaaaattcattggagctcttctctctcttccttttttctgtcccctcccttctcttccttttctttcttgaacaatttagcaatttagtcctaaatatattaggtcaggtagagcaaagtaagcactgctggagaggggagctgcaatgtcacttctgtggggtcccttctgaaagtttggtgtctcactagtgaagaagagaggtacaaataaggaaagggacaaaactagaaggaaccctgtgttatgagagtaaaactggagtattgctgtgaacctaaatacacagatagatacaggaatatcaaggcagtgtgtatatgtacacatgcatttatatgtctactcccagctttgcccactgagagagtctgggagcaatgacatcccaagaacaatgaacacccctagaatccaattcttggcttctaaatactcatttccactaagaggaaccagagttctttggagcaattgctgaatacaagcagggaaattgcagactgagctagagccctgttgatgctggaaaacaaggaaaagatcaaaaaatgggggacatgcaaaaggatcccaaagtcagccagattgggttcccactgccaaacagggcataaatcgagcataaaaataaataataataatattagtggatgataacccagtgaataagatagaaaaatcttgagtccacacatatgcaaataaacacactgaaggtttgatgaggaatggaatttttacatagttccaattacatcccctcagaatacttattaaatacaaagatgaaaagaataactttacagtggagaagcctgacagagagcaccttaatcaaattatcaacgttatcatcagcaatgggacaagtcgaagtccttagccaccacagtaagctacaagagcaccatgacatcagatctgggatttcccaacaaaaatgcaaacctgagtttgatcatgagtaaataccagggaaactcagatggaggtgcattccacaaaataactggcctatggtcttcagaagtgccaaggtcaagacagtcaaggaatggccaggctgtacgcagtggctcatgcctattatcctagcactttgggaggccatggtgggaggattgcttgagcctgagagttcgaaaccagcctgggcaagatagtgagacccccgtctccacaaatttttttttttaattagcctggcgtggtgatgcacacctgtagttcctgctgcttgggaggctgaggtgggaggattgcttgagcctgggatgatgaagttgcagtgagccatgattgtgtcactgcattccagcctgagcaacagagccagatcctgtcttaatttaaaaaataataaaggaatgactaaagaactgttcccaactcaaagcgactaagagacatgggaactgagtgcaatgtgtgattctgaggggcatgggggacccttttgttgttataaaaggcattatcaggacatttggcaacatttcaatgaagcctgaggattcgatggtagtagtctatcattattgatttcctgattttgatggttatattgtggttatttaggaaaataccctcgtttttaggaaatatccactaagatattcaagggtggaggaacagcgggtcaacaactctcaaatggtccaggaaatagaaagttctttgtactatatttgtaacttctctgttgctctgtgattgtttaaaatgaattcgctgaggtcatggctttttttttttttttttttttgagatggagtctcactctgttgcccaggctggagtgtaatggcacgatctcagctcaccgcaacctctgcctcccaggttcaagtgattctcctgcctcagcctcccaagcagctgggaccacagacatgcgttaccacgccgggctaattttgtatttttagtagagatggggtctctccatgttggtcaggctagtcttgaactcctgacctcaggtgatctgcctgccttgacctcccaaagtgctgggattacaggcatgagtcaccatgcccggtcaagggcatggattttgatccatgaatcagtgagagagacgtaagtacaatgcctgatatttttgcctgttcttgaggatagcatccctactattactgaattcactcacatgtgtgagtttggggatcttaaaatatcccagggggtgctttatgcacgagggatatggattaagtccagggtgaatataggtgtttcccagtgataaggcagctgtgtgtgaaagcaaggacaaaaacaaaactaaactaaactaaaaagaaaagtcaggccagtgtgctagatatttacagctgggtgattgtgatggcactgtccttcctaaagctttgtaacagattaagtagattctctaaagccgttcaggttagagggtgccttgcccttattgctccaccgtgctttttggcagacattgtgaccatgtttagtaattatatttggctccctgaaggtaaaacaggagctgcgtacgtattaggggagaaaaaaggaagcacaagaagaaaggaaaaaaaaaattaaggggcttatgttttatatcctcccagtcaatcccatgagtgaataactacattacaaattttgtctcgatgtggtttttaagcctaaagaatctttctttttctttctttgctttctttctttctctttcttttctttcttttctttctttctttctctctctctttctttttcttctctctctctctttctttccctccctcctccctcccttccttccttccctccctcccttccttccttccctccctccttccttctctccttccttccttccttccttcctctttctttctttctttctttctttctttctttctttctctttcttttattatactttaagttctagggtacatgtgcacaacgtgcaggtttgttacatatgtatacatgtgccatgttggtgtgctgcacccattaactcatcatttacattagatatatctcctaatgctatccctccccactccccccaccccacaacaggccccagtgtgtgatgttccccatcctgtgtccaagtgttctcattgttcaattcccacctacgagtgagaacatgcagtgtttggttttctgtccttgtgatagtttgctgagaatgatggtttccagcttcatccatttccctacaaaggacatgtgggctcctgaacttatccttttttatggctgcatagtattccatagtgtatatgtgccacatttgcttaatccagtctatcattgatggatatttgggttggttccaagtctgctattgtgaatagtgccacaataaacatacgtgtgcatgtgtctttatagtagcatgatttataatcctttgggtatatacccagtaatgggatggctgggtcaaatggtatttctagttctagatccttgaggaatcgctacactgtcttccacaatgcttgaactagtttacagtcccaccaacagtgtaaaagtgttcctatttctccacatcctctccagtacctgttgtttcctgactttttaatgatcgccattctaactggtatgagatggtatctcattgcggttttgatttgcatttctctgatggtcagtgatgatgaacattttttcatgtgtctgttggctgcataaatgtcttcttttgagaagtgtctgttcatatcctttgctcactttttgatggggttgtttgactttttcttgtaaatttgtttaagttctttgtagattctggatattagccttttgtcagatgggtagatttttaaacttttctcccattctgtacgttgcctgttcactctgatggtagtttcttttgctgtgtagaagctctttagtttaattagatcccatttgtcaactttggcttttgttgccgttgcttttggtgttttagtcatgaagtccttgcccatgcctgtgtcctgaatggtattgcctaggttttcttctagggtttttatggttttaggtctaacatttaagtctttaattcatcttgaattaatttttgtataaggtgtaaggaaaggatccagtttcagctttctacatatggctagccagtttttccagcaccatttattaaatagggaatcgtttccccatttcttgtttttgtcaggtttgtcaaagatcagatggttgtagatgtgtggtattatttctgagggctctgttctgttccattggtctatatctctgttttgatatcagtaccatgctgttactgtagccttgtagtatcatttgaagtcaagtagtgtgttgcctccagctttgttcttttggcttaggattgtcttggcaatgtgggctcctttttggttccatatgcactttaaagtagttttttccagttctgtgaagaaagtcattggtagcttgatgcggatggcattgaatctataaattaccttgggcagtatggccattttcgcgatattgattcttcctatccatgagcatggaatgttcttccatttgtttgtgtcctcttttattttgttgagcagtgatttgtagttctccttgaagaggtccttcacatcccttgtaagttgtattcctaggtattttattctctttgtagcaattgtgaatgggagttcactcatgatctggctctctgtttgtctgttattggtgtatgggaatgcttgtgatttttgcacattcattttgtatcctaagactttggttaagttgcttatcagcttaagcagattttgggctgagatgatggggttttctaaatataaaatcatgtgatctgtaaaaagggacaatttgacttcctcttttcctagttgaataccctatatttctttctcctgcctgattgccctggccagaaattccaacactatgctgaataggagtggtgagagagggcatccctgccttgtgccagttttcaaagggaatgcttccagtttttgcccattcagtatgatattggctgtgggtttgtcataaatagctctcattattttgagatacatcccatcaatatcaagtttattgagagtttttagcatgaagggctgttgaattttgtcgaaggccttttctgcatctattgagataatcacgtggtttttctctttggttctgtttatatgctggattatgtttattgatttgcacatgttgaaccagctttgcatcccagggatgaagcccacttgatcctagtggacaagctttttgatgtgctgctggattctgtttgccagtattttattgaggatatttttgtcgatgttcatcagggatattagtctaaaattctcttttttttgtcgtgtctctgccaggctttggtatcaggatgatgctggcctcataaaatgagttagggaggattccttctttttctattgattggaatagtttcagaaggaatggtaggtaccagctcctctttgtacgtctcgtagaatttggctgtgaatccgtctggtcctggactttttttgattggtaggctattaattattgcctcaatttcagagcctgttattggtctattcagggattcaacttcttcctggtttagtcttgggaggatgtatgtgtccaggaatgtatccatttcttctagattttctagtttatttgcatagaggtgtttatagtattctctgatggtagtctgtatttctgtgggatcggtggtgatatcccctttatcattttttattgcacctatttgattcttctctcttttcttctttattagtcttgctagcggtctatcaattttgttgatcttttcaaaaaaccagctcttggattcattgattttttgaagggttttttgtctctatctccttcagttcttctctgatcttagttatctcttgccttctgctagcttttgaatgtgtttgctcttgcttctctagttcttttaattgtgatgttacggtgtcaattttagagctttcctgctttctcttgtgggcatgtagtgctataaatttccctctacacactgctttaaatgtgtcccagagattctggtatgttgtgtctttgttgtcattggtttcaaagaacatctttatttctgccttcatttcgttatgtactcagtagtcattcaggggcaggttgttcagtttctatgtagttgagcggttttgagtgagtttcttaatcctgagctctagtttgattgcactgtggtctgagagacagtttgttatgatttctgttcttttacattttctgaggagtgctttacttccaactatgtggtcaattttggaataagtgcgatgtggtgctgagaagaatgtatattctgttgatttggggtggagagttctgtagatgtgtattaggtctgcttggtgtggagctgagtttaagtcctggatatccttgttaactttctgtctggttgatctgtctaatattgacagtggggtgttaaagtctcccattattattgtgtgggaatctaagtctttttgtaggtctctaaggacttgctttatgaatctgggtgctcttgtattgtgtgcatatatatttaggatagttagctcttcttgttgaattgatccctttaccattaagtaatggccttctttgtctcttttgatctttgttggtttaaagtctgttttatcagagactaggattgcaacccctgctttcttttgttttccatttgcttggtagattttcctccatccctttattttgagcctatgtgtgtctctgcatgtgagatgggtctcctgaatatagcacactgatgggtcttgattctttatccaatttgccagtctgtgtcttttaattggagcatttagcccatttacatttaaggttaatattgttatatgtcaatttgatcctgtcattacgatgtttgctggttattttgctcgttggttgatgcagtttcttcctagcctcgatggtctttacaatttggcatgtttttgcagtggctggtactggttgttcctttccatgtttagtgcttccttcaggagctcttttagggcaggcctggtggtgacaaaatctctcagcatttgcttgtctataaagaattttatttctcctttgcttatgtagcttagtttggctggatatgaaattctgggttgaaaattcttttctttaaggatgttgaatattggcccccactcttctggcttgtagagtttctgtcgaacgatccactgttagtctgagaggcttccctttgtgggtaacctgacctttctctctggctgctcttaacatattttccttcatttcagctttggtgaatctgacaattatgtgtcttggagttgctcttcttgaggattatctttgtggcgttctctgtatttcctgcatttgaatgttggcctgccttgctaggttggggatgttctcctggataatatcctgcagagtgttttccaacttggttcctttctccccattactttcaggtacaccaatcagacgtagacttggtcttttcacatagtgccatatttcttggaggtttgtttgtttctttttactccttttcctctaaacttctcttatcgcttcatttcattcattgatcttcaatcactgataccctttcttccacttgatcgaatcagctactgacacttgtgcatgtgtcacatagttctcgtaccatgtttttcatctccataaagtcatttaaggtcttttctatgctgtttattctagttagccattcgtctaatgttttttcaaggtttttagcttctttgcaatgggttcgaacatcctcctttagctcggagaagtttattattaccgatcgtttgaagccttcttctctcaacttgtcaaagtcattctccgtccagctttgttccattgctggcaaggagctgtgttcctttggaggagaagagacactctgatttttagaattttcagcttttctgctctggtttctccccatctttgtggttttatctacttttggtctttgatgatggtgatgtacagatggggttttggtgtggatgtcctttctgtttgtttgttttccttctaacagtcaggaccctcagctgcaggtctgttggagtttgctggaggtccactccagaccctgtttacctgggtatcaccagcagaggctgcagaacagcaaatattgcagaacagcaaatattgctgcctggttcttcctctggaagcttcgtctcagaggggcacctggccatatggggtgtcagtctgcccctactgggaggtgcctcccagttaggctacttggcagtcagggacccacttgaggaggcagtctgtctgttctcagatcttaaactgcatgctgggagaaccaccactctcttcaaagctgtcagacagggacatttaagtctgcagcttgctcttctttctttctttctttctttctttctttctttctttctttctttctttctttctttctttctttttctttccttgcttccttcctttcttcttctttttcttcttctcctcctcctccttctttccttccttccttccttccacccccgtttctgtctttcttcctttctttctgttcttcttttgataggatcttgctgtcacccaagcttgagtgcagtggttccatcttggcttactgcagcctccacctcccaggctcaagtgatcctccctcctcagccacccaagtagctgggaccacaggcacacaccactatgcccagctaattttttacagtattttttatagagatggggtttcactgtgttgcccaggctagtctcaaactcctgagctcaagagatccaccagcctcagcttcccaaaaaagcatcttgtttttactcgcatgctttgtccctctgccaggacagtagctgtaatcccatctttgccatctagcttgcccccagtggctggtggggcacaagttttatttcttgataaggctgtcatattatggctaatgcttataaatgcttcatgttggggtagagtggaaattgacactttcagccatgaagacctcaaattttgggactagctagcctgtattgcaggctttggtgaagccaagggcgtctcctggaagggctgtattcctttccttctgtacatttccttctttccctgattgtagcaggataagggtgaggcagccgaggtgcctgggctgcaccatttaagcaggcgtcactctcagggttgtggaaatgcgggacaggcacctgagggtgatagcctctttacaagtgtcttggggacctctcgtgccttgccctggttctgggcctgcagcctggccagcagtcatctgagtttacttctcattttcatgtcaagaaggaactgcagatgccaatgctctgactctttcctctgatttccccagtatcacagcttcctttgacaagtagtatttccgggttgcagtaggtgaccgtttcctcacatttttgccaacatgcaagaaaccagatttccagccagcaacattattgtccacatgccgagtgtccatctcctctcctcagccatttttccatcttggttctgttacttgtgacattctgtttccgtgtgagagatcctgcatcagttaggaatttcatacagctctaagtgacagaagcccccacccagtggcttcaacaatttgaggatttatttttctcttgcaacaaggaaggagttctggagggagacagcccagggctggcatggcgagtccctgagaccctgggtcctttgatctttccactccgcccatccctagcacagtttgccgccttctgtttacaatacggctgccccacctgtgacattacatctgtgttccaggcagagtgaattcacgaggaaaaggtgcataggagatgaatgtatttctctagtaagtagctttctcagaagctcaaccagtagctcacacttacatcccattggatactgttgtgtcccctggaaaccctgtctgcaagcggagctgaaatctagttgtttttgttttatttttatttatttaattttatctaagtacacggggtaggataaaagcttggctatgatggagagaatatctattgggtggttaactggtcatccttgtcacagctctgctcggcttcttttgcaaaccggtcacaccatgtgggaaggaaaatagccattgaggtagcttttggtggcctccaacttttatcctttgccttattgtccccaccacaggaagaaatatttttcttttagttcctgtctgtcagtctcaggggagactctgactggctcagcttgggtggcacatccgtccccgtgattatacagggacacgagcaaatgcttgtcatctccaacttatcatgtggagggaaagggatggcttcccccagggtgggacagtaatggagaaaaacagcttgcactgtaagtccacgacatttctgtcctacattttgcaagatgtgatcaatatgtattggcaaagacaaaatgagaggctacttttggtggagagcaaatgatagtcaagacaggaatgtgagaattgtgtatactgtcctgtaccagtcaggagcctagcttggctgcagaagagggctaataaagaatgaaataggtgaggcaacaaggagttggtagttgaaaagcatttatgttctttctagtgaggttgttttgtttagattcttctgcctaaagaggaaatgtgttacgctgaccaactatgcgcctccagccatctcttctacttgtttttgacgttatagttgttagcattgggttacttttgacagaaaaccccaaataatatttgtttaaaatatacctgagtttttttttctctcatatgaaagcacagataggcagtccaggattggcttggtgcctcatggtttcaggggattgtgcagcttctatctttctacttcctgtgtggcttcaacttcatggcttatggaaacatcacactctaggtggcaggatgaaagcagggacaaagcataagggacatctgaatgttgtcccttaaggaaggtccccagaagctgcccaatgacactcccactcatgggtctttggccagggccacggctagctgcagaggaggccaacagatgtattctgggaagctcggctcaaaacactatcttgtgggccaggcgcagtggctcacgcctataatcccagcactttgggaggctgaggtgggcggatcacctgaggtttgagaccagcctggccaacatggtgaaaccccgtctctactaaaagtacaaaaaaatagccaggcgtggtggcaggcacctgtaatcgcagctacttgggaggctgaggcaggagaatcgcttgaacctgggaggtggatgttgcagtgagctgagatcacactgttgcactccagcctggacaacaagagtgaaactccatcttagaaaacaaaaacaaaaataaaaacaaaaccccactattatgtggatgcagaagagaagggatattggagggtgtcagcaggctctggccaggctcagtcctctgctcagccttcacagccagagatcatggggataacaaggtcgtggatctcagtggacctgactgacatgaatctgtatttacaggagcccaagggtatttcttgcagggggtggattatacagctgaaagcagctgcttttacaggattacgaagagtagctcttttccacgaaacaatttagaatatacacagtgaaggaagtctcactaacttcctttaagaaagttgaggtgagaaagagtagacagtttgtaaatggaagttacctaactgacttctgcaacttggggggctttgtagcatcaacgggtcagaatttcttagaggcattcttactttttaggtctcaaatctctgtcatttttcccttacggtatttgcacagtgcagcctgccttctgtgacctacagaagcacattgcatttaacctgaggcttatttgatattacactttttttctttccttcaaatatccacaatctaaattgtgttcagaaagttccgaagagctgtaatcccagcactttgggaggccgaggcgggcggatcacgaggtcaggagatcgagaccatcccggctaaagcggtgaaaccccgtctctactaaaaatacaaaaaaattagccgggcgtagtggcgggcgcctgtagtcccagctactcgggaggctgaggcaggagaatggcgtgaacccgggaggcggagcttgcagtgagccgagatcccgccactgcactccagcctgggcgacagagcgagactccgtctcaaaaaaaaaaaaaaaaaaagaaagttccgaagagttgccagggctctatttaatccattgctcttcttagcaatgcaaattctgtgcacaatgagtttattctccttgagaagataaattcagtttggctccagtggctaaactttgttggacaagtttattcctgtgtgacacctacctggccaagcactgtcatttggatgggtctttgggcaggtaagtttctgtgcacctagaaaccttccctgctgggatcttgtcccttgagctcctcctctccagttataaactctgttggcatctttataggatttactttttatgtggattccattgtctccaaaatgccctttcttagtaactagttgggccatctacaccctctttcggggtacgacatagaaatggaaatggaaaatttgtaaggaattatcataatgttaaaatacagataccttgtcattaaaccattaaaaacaaaattttaaaaaccttaagtgttggaaatattaggattccaatgctccttccacttcctgaaggactcatttctctaacatacttgctgaacaatcctcctaccttttccctgcggcattactaaataattcagattgtttgaaaggcattctcttctatcgagatgcaatcaaatttgaggagtgtatttcattctcgccgaatgcattatatcttactttccataaagagaatccaggtatgtgctattgccttatgccttgaataatatgaagcgaagcgatcactcttatatttggggagtgttttagagtcttcagatgctttatgtagtatcaatggctccaaatataataatgtacaattaagaatcacataggcaggcatttttataatgaggaaaagtgaagttaggagagctatgttcactttccaaggctacatagaacgagtgagcgccaggactgacagttccttcctgctctggatcttgtgggctgtctcctccagcacactgcatgctagaggaagccagcgatggggcaggagtggggcgagcatggcagctgaccccaagatgggcagagagcctgcccctcactgttcttccccgccttaaaggacataatctaacctctggacatggactataatctagcctcttctttattacttagggtaaatagtacgtctactgattattaattaaataacattcttcacctgtacatgttatcacactttagttcttagactgctttcatattcaacgtggagatctggaaaggcaacttgactatcttcattttatgattgaagaagctgaggttgagggaggctaaatggcttgtagttacactacaaacactaaaacagcaaaaattagcattggaactagaacatctgatgcatgttcatgactttgtcctcacagtcatatcctcagggtctgtggagtggtgtgtggctgtggccccttagttagaaggccgcagggactgtggtgttttaggttgtgccggctcttcgtcattttcccttttctctcctgtcccttccttccaggctatgagctatatttgtgccagcaagcagtgtttctctctgtttcagctttttcctactttaatttgtttgttttcatctgttaggatcttagagatgagagaaccaagatgatttggaatttcatgtgagattacagaggatagactcagagctgaatggtagcctatcaataacgttcatacatacactctctgacctctttgttggtctccaagaagcctttcagatttagttcctggttgtgggttgtgtttgaggtaggaggaccttgttgatggttgcattccaattaaatgagatggcagccctcacggtgcctgtgtgcatacaacatgtctgtgttagatgtgcatttgcaagtaactggttatagaacattattttggaatacaacacttgtgaaatctgaagatggttttaaactttgtatttcacctgcaattatcttgtagtactctcagttaggagaaaaatatctcttttgctctgaggattcctcagtatttttagtgactctttgcatgcttgcaagggctgtgagaacaagcccagcaggaaggaagagacatggggggaaggaaggaacgtgagggaagtgagaagaaaacaaaggcaaagtttcatacctggaaggcttcgtgcaccagcgcccacctccggaaaccacagttgcaaatattcttttgtgacctaattttggttctaggtttcctttcctctgtatgtgtttgctacattccattccctatgcaatagagtttttctgtaaagaagtttccaagtataaccttccatgaagctcctcaattttaagaatttataattttccagtcctagtgcttaactcatccatcatttgttttccctcatattttacctgtttggttgcactcaaagtcttcgttgatggatgaaacctgatggtttttaagaagcagaaaataccagttttgtcctcactgattgatttttcttgacagatcacgagtataatttataccagctcagtggcactaatcttgttttgttgttgttcttaaaacagctttgacaataagctgctactctgactttgattcttaagtcagcattaatgaaacaccattcatttgtgttatcagctgtaatagtcaaaaacaggtttaagactttaccatgcttgctttcaagttttgggtggatttctttttcctccaatgcttaaaaggtttagtaagtgaatgtcaggtcaaatgggcgtagctgagtttctcccaggcacgctggctttcctgtggatgtttttgtcacagcagtctaagtgtatgtctttctggcccggtcagggaactttgctgtggggatttggtttaaattcatgtttaatctcctaattttatttttgtggctatagtgcctcaccgagtatactgaggctgagactggacagaaagaccttttttctgataagctcttaatctgtatcaggctcagccaaaatgagttctgttagggctgctatttttagctatgtgtaatagctattgtggtctcacaatacacttgtttatacacagaatatggttttatgcacagaattttgtgtattaaaataataggcaaaatgattacaaataatttcaggtgtgccttgatacaaatcagatctgtatacttgtgttttcctgttgacatctgtcatttgcagtcagtggcttaaattaaaattttttggtcttagggaaaatcatgtgagggtttccctgttgcctctctcgggcagagcttctcagccttgacactattgacgttttagaccagacacctctttgctgtagggggtgtcccgcgcatcgtaagaggtttagcagcacccagggctctacgtactagatgctagtgcctcccctcccccactctcagttgtgacaatcaaaaatgtctccagaccttgccagatgtcccttggggatatagggctgccagagttaacaaatgaaaacacagcgtgcctagttaaatttgaatttcagataaaccatacaaattgtttttattgtggtaaaatgcacagaatataagacttaccattttagccatttttaagtggctaaaatttgtaagtggtcagtgtcattaaggacattcacattgttgtgcaaacatcatcaccattcatctccagaactttcttatctttgctagctgaaactctgtccccattaaacactaagtccccatcctcccctctcccagcccctggcaacctccgttctcctttctggctctatgcatttgactcttctgggtatctcatgtaagtagaatcatacagtatttgcccttttgtgtctgtcttatttcacttagtgtaacgtccttaaggtttgtctgtgttgcagcgcatgtcagaacttccttccttcttaaggctgaataacattccactgtgtgaatgaaccacatctccttcatccgttcatccatagatggacatttgggttgcttcccgcatttggctattgtgaacgatgctgctatgaccactggtgcataggaataattttttagtgtaaatatgtcccatgtaattttagtacatacttttatactaaaaaattattcattgtttatctgatgttcaagttaactgggcaagttgtgttttattttattgggtaatgctacctggttgagaaccactgccctaggactgaactgctatttttttttttttttttttgagatggagtcttactctgtcacccaggctggagtgcagtggcgtgatctcggctcactgcagcctccacctcctgggttcaagcgattcccctgcctcagcctcccaagtagctgggactacaggcatgcgccaccaagcctggctaatttttttttttttttgtattttagtagagacggggtttcaccatgtgggccagggtagtctcaatctcctgacctcgtgatctgcccgcctcggcctcccaaagtgctgggattataggcgtgagccactgcacccggccagctggactgctttctttgcttgggcactggctcagggctccaaggaccgtggtcataccttcccatgcaacttacatatgacttccaagacttccagcacagtgaagagcacatggaaaaatgtgggcaccataacatctacataccctaaatgtgtcagtcagcttcaatttgttctcagtttgggaagggtgatagagatactgacccttccttttgacctgcctcttttccattttattctggtaaattcacgcttattacagcacttacagagcaaatcatattatgattataattttatgatatcatacttttatattatgaatatatttataatatgtgaaatgattggattcttcaaaaagtcaacttaaagaaacaagttgggatcctcactggctacttgtgtcctatttcaaattatttctatttgccctttctgctcctctccccagctttattgaggtatgctggacaaataaaaattttaagtatttacagtataaaatgtgatgatttgatgtatgcatatgttgtgtaatgattaccacaatccagctaactaacatgtctatcacctcactagttacctttttttttttttttttttggagtgtgatgagaacccttgagatctactctttgggcagttttcaagtatatgacacattgttattacatagagtcaccatgctctgcaatagatctccagaatttattcatcttgcataactgaaactttttaccctttgatcaccatctgcctttttgctttttctatcactcagagaaagccagttagtggataatttctacatgattgaggttaatagaatgcggccacctaaaactgtccctgaggcttgggaatttgggtgaatcctgattctgccatgcactttgggcaagtcacataccttcagtctcagtttcctcatccgtgactaaagaatagcatgaatgccttctccatggaatcaccatgagaggtaaaggaaatattgcacttacagctcctgctatgaaatatctagcatctgacagacatgcaccttgtcttagatgtcgagctgcagagcagttttcatggcagaaagagagcaatagttgctaacacgtatgaactgcttactgtgttccaggtactagtctccagtttttacttgtattgttgcatttaatcctcacactgagcccacgaagcttgtcctaacattattccctttcacagatgaagaatgtgaggcacagataaggtacattcatccaagggggtatgtctggcaagcagcagagcagggcttggcattgggacatcctgattccagtgggaatagttgtcctaaccacttggctagatggctgcctgtggggtggtgcttctggatggaacacagggtgcacagtgatgcatttgggaatcactgaggcaggagagtgaccccacccagccctccaggccagccaggataaccctggagggctggagggggacacgtcctggtgagtgcaccctccctctgggttccaggtgagatacccttccagctggccttttgagcccagctcccccaggaaggaaggatgctctccagcaggcgctcctcagagcaccttctgtgttttcacctcacttagaaaattcaacctctaaacatcattgagtggcactgagaactaaagccacaaactcccaacttgagaaaatgcaatatttatacatttaaaacagccaaaatggttttaacatacctatactgattcaaaaaagaagtctgagccaggcgtggtggctcacgcctgcaatcccagcactgtgggaggccgaggcgggcagatcatgaggtcaggacattaagaccatcctggctaacatggtgaaaccccgtctctactaaaaacacacacacaaaaaaaaagttagctgggtgtggtggcatgcgtctgtaatcccagctactctggaggctgaggcaggagaatcgtttgaactggggaggcagaggttgcagtgagtcaagatcacgccactgcactccagcctacgcaacagagcaagactctgtctcaaaaacaaaacaaaaaaaaccaaaaaaaaaaacaaaaagaaaaagaaatccgttttcgctgagccctcctggcaggtagtaaaatcttggacttgagctccctggggccctgtccagttgccctcagtgccctcccttccagcttacccatttaccaggtgttcgaggctgctgccagtttaaattttgtttcaaaaactggccttctctttctttttattctgcaacattttgccttggggcctagaaaggaatccttagtcactgattgccgtaggcggatattacctcacccagtatgggcttccacgctaaagacctctcacaaacacttgcacactttcagactcaccctgcacaaggcacgctgacgctgtttcctagggcttattcccaagaacacgtctctgctgagacttggtttttgttaggatgtgtgtgattccatgtgttccatcatgcagaggagatgctgaaagttagcgctgtggctttcaagatcctcctgtggcgcctttgtatatggcatagaatggtgccaactggagtagcctgagaaccagaaacaagaattctgcttctgaacagcttcgtttttgggccagagaattgtttccaccagaggaggcgtgatgggagcttaggggctatgtgctcggtttctgaagttgtacaacggagcattcatttgcattcatttgacaagtcctgctgtgttcctttacttgttctcttctgtattatgggcttaagggtcgcttatttcaacatcgctatattttccctgaaagctcagtaatgattgaatcacagaatttaaagagcttgtcgtataaatacatctaaagtgaaaaagatgaactttttccccagtgaatacaggcaaccatcaatcaaaggaatgcatcctggaaaagaaaggcacagggtaaagcctgcctcctttgcgggtcccatctgttcttgggaggacagtccccatgtattgctcctgggccctttgtggccgagcacgaacagctgtacatacaaaggaggctgtgtgtttgttcatgatgttggaaccggaagtggaaggggctttcttgtcaaagaaggcacatatgagtgccatagttacgggacaaaaatatttctcctggaaaatctattgaagcctttgtgcgatgttcagcagagtgtgttgggggtgggtgtgaatgtatctgtgtgggtgaaatgaggataatgtggtcatgtgaacaattcaaggcaagaaaagatccggtgatactgagaatcctgattctcctttagagataggagttctctggctattctgaagagtgaagttactgcccatgatgttgcaacatatggacatttgcaacaattttttttttttttttgagatggagtctcactctgtcgcccaggctggagtgcagtggcatgatctctgctcactgcaacctccacctcccgggttcacgccattctcctgcctcagcctcctgagtagctgggattacaggcgcctgccaccatgcctggctaattttttgtatttttagtagagacggggtttcaccatgttagccaggctggtctcgatctcctgacctcgtgatctgcctgccttggcctcccaaagtgctgggattacaggcgtgagtcactgcgcccggcctttttttttttttttttaaatgattcttttgttccagttattgacctagcaccagcatttgtcttatggataaggtgagggcaaaattgcactgggtgtggcaaggtgattctgcacttagaggttcgtgtttatggtgctactgagggactgaagaattcatctggaaacttttggctgctcccctatcctcttcttgctaaatcagaatggcatacagttaaaaatacgggccccaacccgaacacaggatttcaaggcttgctcactgcttgcatgatcttagaaagtcacatctgactccaaaccttcgtttcttcatctgaaaaacggtgacgatgatgacagaactaccacctgcatggtgatgctgtgcactcaggaaggttttagaaccactagagtggactggggctggaatggcttctgtcacagaattcagagttcccttgtactgcagagagtcaagtgcagctgaatggctgctaccagggatattacccagatgttcacaggtcatgaaagtgtgggacaagatgacctcagagcttcccctccactggtgacaacacatgtaacatgcctcctattaagcctgtaatggggtaaattgtatccccaccaatgataagtccaaatcctaacccctgatacctgtgaatgtgaccattcttggattataagatctttgcagatttatggatcttgagataagatcatccttgatttaggatgggccctgaaatccaatgattagtattttttatgagaaaggagtgggagatatgagacacagacacacagaggggaatgacatatgaagatggaggcggagacagtagtgaggcatctcaagccaaggcatgctacgggttgctgacaaccaccagaagctgggagagaggcacggaaaagattctccctcagagcctcagaaggaacccactggactaacaccttgactttggatttctggctgctgggacaatgacggagtaagtttctgtagttttaagccacccagttttcgatactttgtcatagcagcattaggcaactaattccatatctcacccataataaacactcagtgctagcaattggctgccactgtggtgattatcagcatggaactatgtgttcctgaagagaattagttattccatttctatgaatattttcaacccaagattgttgctctcagttaacgtactgaaaatgaacttggtgaaaaagtaaaagctcttctacatatcccatttgtggatagacttaagagaacagaaagcttattatggaataagcaaattaatacctttgggatcaatagagtgtctacagttcaaaaccctatcaaaagtgggtttacgtaaaaaaaactagtgtgttatccatgtgtaatattttgtataatatacaaaattctggaaaggaagactcacaatgccagatcaagtattgcaacgtcagttatggcaggaacaaaggctcttcccagaagcctgtcttcattgtgcattctttcaccagaacaacttgctgtacttaaggcacaggacatttggatctagagatgtagctgttgtgactcaccatttctataaacttggtgactggtcccaggctgtcatatctgtacctgatccactacagggatgaattgacattttcagtggctactttgagtccagatattaatagatcagcctgaaagggaggatgaggcagtaatagcacttttacaagcaatagaagacaagctcagggaacaaaagagaagggaagctccttgaatttaaaggcaagggcagagatttattcctccactaaatctaaggactaaaagcttaggtggagagagggctcaaatgtgaattcacttctcatgctccctttgtgacctcctttaaggaaggccagatttgaggaatgagattttcccaaggggaggaagcattgtcttcatcacttcatgtatttttctcagaaggctattggcctcctggaatttttacttagaattccagatagtccaatgatgctttctaggtaccgtggctttcactgtggtgagagttttggctgcagtgcttttctgtaacccactcacaaagcctttggggatggtgatagtatagggattgtccttccaactagttgctctccaactagaaaggcgaatccctttttctttgagtcacagaggatggagaggctcagcattctcattccctgtttgggtttccacccctgtggccatgcaatttccatttatagccatgtattggcttacaagcctaacaccaatcctgacccaaagcatgaggcactctcacacatttctaggttaagaacactaaaaagcaggatcatcaggttattttttgttatttgtagatttctgcatagcctgatgcttcaacttcccaagacctcatttcttcccagagtagctggagtagctggacctttatcatgttctggtatcaaattctgccttggtaatgtgtacaatgcttcaagaattgcggactccatattactctcctgtgtcatgtagttctctctttgtgaaagccatccttccctgaaacccctcatccacctgcctaccttgccaacattccctgctcctgggttgcccttcattgtgttctatttatgggtaaccatgctttgccaggaaccatgccaagtacttggaatacgaaggaagtcattgatggagaggacacacaagtaagtaaagggccctgataaaatgcgacgagagctaggcacgtggatttttatgcaacaaaggagataggcaaggagcccacgaactagtttccaaatgctggacccccttgatcaggaccttttcggagcaggctcaagtgtctcccaacacctatacctggctggaccccttgccattgtctcaccacaagttgatgctatagttccagagggctgccccgccaggccactctgtcttttgcaattccagggtgggatgtgcattgtctacttggacctaggaactcccttcagcagttctcctgtggacctgtatccaagccaccctacaaagtgagcatgcactctgatttaggaaacttttcttgagagatttattctatagtctccctaacatcccattctggtgtttattccattaatttagagcaaacacccattcagtgaagggccctgaaaggcatagaaaaggacaaagtatcagacttgatttctgctctcagctattaaaactggagaggcaaggcacatagaaagatagggatgacatgatatttaaacaaatgttctacacagtgtttctcaatataatgttcttgtcctgttggggggcttttcagtaagcagtgtcagtgaaagggcagtgacagcaggagatgatttttggttattttctgcataggcatcctcagtatggaaggctgtgcccacctacgtttgaaatgtgcaagcttgattcttctctcttttcttctttattagtctagctagcggtctatctattttgttaatcttttcaaaaaaccagctcctggactcattgatttttttgaagggtttttcgtgtctcttatctccttcagttctgctctgatcttatttacttctcgtcctctgctaacttttgaatttatttgctcttgcttctctagtcctttttattttgatgttagggtgtcgatttgagatctttcccactttgtcctgtgggcatttagtgctataaatttccttctaaacactgcttcagctgtgtcccagggattctacaatgttgtgactttgttctcattggtttcaaagaacttatttattcctgccttaattttgttatttacccagtaatcatacaggaccaggttgttcagtttccatgtagttgtgcggttttgagtgagtttcttaatcctgagttctaatttgattgcactgtggtctgagagacagtttgttatgatttccgttcttttgcatttgctgaggagtgttttacttccaattatgtggtcaattttagaataagtgcgatgtggtgctgagaagaatgtatattctgtggatttggggtggagagttctgtagatgtctattgcgtctgcttggtccagagctgagttgaagtcctgaatatccttgttaattttctgtcttgttgatctgtctaatattgacggtgggatgttaaaatctcccactattgttgtgtgggagcctaagtctctttgtaggtctctaagaacttgctttatgaatctgggtgctcctgtattgggtgcagatatatttaggatagttagctcttcatggaggcaacctcaagtagcattattgttcttttcatccttcctctcctactcacctcccccactcctgacaaaatatggaaatcctgtccctgagtagtcttgttcacaatacacaatctcacagccaaaggaatgtatttttaaccctgagacgccgaaaacggcttgaatcattcatgctgtcgtctattagtctgccgctgtgctgttatttttcccaggcttaatgagccctcatggcactgcgctgcctcagagcacggccgcagcttcaagcacagacaagcctgctctttaaatatgcaagtcatcagcctttcttggaaaatgctatggggaaggtgctctggacaagcaaacagatgatttttgcagactgttctgtagttaatttgggtcatgaagcccactgtggctcaaggagtttaggggacagaaaaggggcttttgaaggattaacaaccagataggaagaaagaaacaaatgaagggtaatcctggttttcttttgagactgacaagaaaaagttgtttgaaaggaggacactccaccattgttgttgttgaaggagagctgtacttctgatgtcccccaggctttgtagtagttaaggggtgagggattgcaggagctgctcaaacctggctgctaatatgacactaggagcctgggtgacacaggggccatggtgccagctgcaggtagcgtgggattgaccctgttagccctggacatcaagcctggagtgagagatggcccgaaaacccctgggacctgatacaagcaagggctttgggatcaaccaggctctcactaacaggcatcactcaaaaagaaaagcatttatttaatagagagtttcagaaaatgttccccttattatttttctttgatttttgaattggaaggcgcttagagatcctgtcctttaacccttgcgttgtgcagatgagagatgtgaggtcagggaagtttagtgggctcagggacgcacacggagttcacagggtagcccgatgcagtgggagggtcgatgggcttctgcctcagagttcttttcaccctaacatttcctgtgcatttgtttacgtgtgccagggatcgctctaagtgctttgtacacattaaacttatctaatctttaccctaactgtgagaggtggctgccatcatttttatttaatttcactttgcattaaatgatgttggcacagtgatgttaagtctgttgcccacagtctcctgcctggaagtgacagtcaggattcaagccaggcagtgggagcctctggagcagccctccaaacctctaccccatatggctcacatagcctctaaaaagggttttgtgactgatctgagatcctaaccattatctatgacttcatattcctgagcagggggcagctggggaagcatttcaagatactcaaggacaaagcacccatcaacatagatgggtgcaaactcaatgctatctagttcgctgcagctgtttggctaaaggaaaacagaatacctgcagagctgatggcttggagactagatgtacaagattacaagccagatgcaagtctagtttctggggtccatctgtgagcagaggtgtgggtggaggcccagaagccaggctaccatttgggattgactcttagctccttacatgcacttaagcagccattcatgaccttttctgcagctcaactgatacactcaaggctgggcatgtccttctgttctagtcattctgcttttggtccacttctatatgtttgttaccaaactagacattgtcttcaagacccactctggccaagtcctggggtcatgtttagtcctggaaggacctccaggagatggaggtagttcttagttgaccagaggggagcaggaccacctgtgctttaaggtcatcctgatttcctggtggtcgttaatacgaaagaagctacaccaggcttgacttctctgagtcagtggtgttcagagcccttgactcaccctggacctgggcttggcaggaatttctctaaccttaggtggatgtatgggtgagtctgcacagcaacttactgttctggtgcatttgtgttggcatgcccatgtaccgggagatgccctagggacttacttatgacatactgacctagagagggtttgcgtataaaattttaacttgactcactggttcctggcagggtcaataaatatttgtggactcactgagtgaatgagtgagtgaatgaatgaaccagtctgctaagaagtgtgagcacagaatatgtgtgctgttctgacacatgatgaccctatcatcctttgaggacctaccatatagctcagttttgacactgcttgtgatttttttttttttttgtctttgagacagggtctcactctatcacccaggctggagtggagtggcatagtcataactcactgcagccttaaactctttgactcaagtggtcctcctgcctcagcttcctgagtacttgggaccagaggcgtgtgctaccatgccagataattaaaaaaaattttttttttatagacaaggtctcactgtgttgcccagggtggtcttgaactcctgacctcaagcaatcctcctgtcttggcctctgaaagtgctggttttacaagtgtgagccaccaacccctggtcccacctgtgatatttttcaccagctcatggccgtggggagcccgactatttgcatacgtgttttttgctcagtactgacacctggtggcagtgtcccaaattgcaagcacagtctctagcattaactcagtgtcaggactttggtgtggcggaccataagaatgggagcctctggagttatgcagagagaagtagccctaccagggaagatgtaatcttgcaaaataacctacctaatgacaatgagtctcttgtcttttcttagggctgcataatcagcaccacctgatttagtggtaagaggaaaggtgctagtgggaaatgccattatttaaaaatacctggagactactgatctagtttaagaccaatatttgtcccacatttgatattagaaccaatagaatgatagaagtaatagctatggtactattaatagctcctattgaggacctgtgaacacactgctggaccctgtatatttagtatttctaatcctcatgataacctaacacatagggattattatttccattttacaaattaggaaatggagctttggtttagtaacatgcctgagttcatggtaggggctggatttgaatctcaatttgcttgacctcaaaggctatgctctttcactctgcttcaagggtactgtgttactccaggggtgccattcacattctagtcagtgtacatggcatttctggggttgtgtgacttgtagccatcctctttccatcattcccactgcctctccaggagccaatcatttatgtctcttctaagctcagtgggtgactgaggctgtgaagacatttaaaattgaataatgtatcctgtagtagatgcattgactatttctctagagttggcatcctaaaattcaaaatttttggtctggcagcctgtgaaaaaaatcgtattttgcctctaattctcaaccctggagagcgccaattagttgtgaagttactttcaaactgaagcccaatttatactcctaataaaaacatccaatgtaatcatatgtgaaatggaggctaatggccctataccacccgagcatcaccatagtgatggtgttgaggataaaaatgatgacaatgacaacagcagcgatgataatagttaaccattgtcgagtacccattatttccttgactccttatagacactctgtgagggaagtaatagtattgtcccaattttcagaggaggaaatgaggtgtagagatgctagttatcttacccaagctcagttgactgtgctggtaagttgtgaagttaacctaggttagcctgagttcacaggctatgctagattaacttcagctagccttgcttttaaccacctacactgacagcctttcaattgtaagaggagctttgggtttttgctttgaaagtagaaacaagtatctagtgataataatatgcctaataattatcctgcacaaaataaataatccagccacttatcaccacctctaaggcaccttctcatcctgtcgttttaaggttttgttcttttggttctgtccccagccaggttttcttttccctccacatgcctggtgtggtgtgagtaaagcatctgccattttgattatggcacacttgctacctcttcttaaaacattcgttctcatccctagtattgtgacattctatcatatctctgatttttaaaaggacattggtgaatttccagaaaaaaaattttccaacctccttttaacctggcatcttttaaaattaaatatgtctctccaaacatattggtggggaagagttggtgtcatgagttaagtaggggtataattacaacccgaaagtttgggggcaaaatggagcagttccctcattggtcagagttctgtcattggcccagcctcctgtcctccacaaatctgagtcagggtgagacaccaagagcctcccttgagaccggcactacttggaaacatgactggctatttctgctgcaggattcctggtccgggctccagcaaaattattgttgtgaacataggccttgaagaggaggctgaagccgagaagccaatattcactcaccttttcaaccttcgacaaggctgaaatttctcccatgatatcactggaaggaagggcagagggagtcaacaatgaagaaagtgggaagagggagggagaatccaggcaggaaaaggggggtgaccgtgcagcaatagctgtgagggcttcccagcagcgttagacacaccctttgcttcagggtcgccatctctgtctgcatctccttcctctccttttgacccagcgtccacttctactttggttagttaaatattgaaataaactcctttacaatgtgtggaagtctcagctcctcagcattgtatcttatgggaatagttactcttcagcctccgtgtgtatccagggcgtggaggccatgctgtggggactgtgtgttaatgtccttgtagctcaagaacagctgctcttaaatggtccgtgctgcggtttagtggacacaacatagcacagataagtgaagaaacaagtcatttttaagtgacgcaaatcacagtagaaatatgcaacttatggaagtgaaatccttttagtattaatttttcttaaatagcaatcctttgtagttgtaagatatgtaacgtatatattgttacctagttggatgaaaaacagctaaatcaatgattgttaggtttcttaggtgaatgatctgtttaataaaattattggaaatgcatattctttattttgatcaggtggacaaattgttccatttcatagttacaccctgacttccatttctgaagagataacccaaaggttactggtggtgatggagggcatcccagtcctcccctcatttgaggggcagagcttaattctggattgtgcttcctccactggagttgatttagagagcggtttggtgaaaaccgaagaaagggtttatctcagagcctcctgctcttgtttgaacacgctgcagggattaacttgtggttgggactgagccagagagataaatgacatagcccttgtgtgctcacattcagagggagctcttgccaaatgggacaacgaaggattgtgttaaagagatttctgaacatcttaatacagcaggatgatacagtctgctctctggactttctggggagcactgagccaagcctcagaggactgtggcatgtcgtgagtgtttaatatgcaagtgacatctaacaggggaaaacaagacatttggaaacaccattgggtggggtgggtcccccgcatttttcagcacggattttttccaacaatctcatatatacaaaggaagtaaattcacaaaagattgggtgttgggggcgtggggcgtggtgaggaaggaggaaagcactaaattttattagagtgcttctcaaaattgagagactgaaatttccaaagcaggaaagattacactgaaagttgggaatgtcttacaaatgtacatattgtcctctacgcgtgatataaaattgttcagcaatagatatttcaggaaacgtaatcagtgtaaaccctttgatgaggaaagccatgcaaacatttttaaacaattgcatccttatgtaatcctggtgttaaggggtgggcttaaaaagccaattcggtgagtagagggactcgtaccttatacagggtttggcgtctaaagctaacacctaaggcataaattaagcacatttacaattgcccttgaaaattccttaagttgcccataaagtacacaaggttttgtgtgtttgggtcttttcagtaatataaatgtggacgtgcacaatggacaacacttaatagaacacacatgcaaaatagaattttccagaatttttattgcacaaaacattcacatagagtgcacctggttgaacgtatggaagttacatgcgcatgtggtatgactgcagttgtggatagacctttttactgcgtcctcctctctagcacctaagtggttcctgtattcttcccaacgtaattaaactgcaggaggaaactggccattccaggtttagacagctgcccctttgaaagagaggaaagtgtgtccatgctggggagaggcagctgcaggaaacgtcctgagcttgtgaaagtctgaccccaggaaccaccctgagctgacctcccaacattctggttcctactcctcaggctcagaccctggttggttcacggccctggggtcatctacacctctttggccttgaccttggacattcggcccagccaccttccactccacttttttttctcatagattcaccgttttcatcctgcccatattctcccagcatccagccaatacctagttttcccagcatctagccccagttcctagttctgctgcccctgctctaggctggtcagttatatagcgttgcttccctgcaggtgaggtggcatgtgacagggtagggtaggtctgacacccctgcactctctctacccacaccgtgaaaaatagtgagacaacagcattgcattcttcattttgaaagaggtttgaatgtttttatttgtggaaggtagatgtcatgaagagttgcataattaaactagtacagaggaaaaactggcagagaagtgagttgcagggctaggtttacatacaggatgacaaacctgtctctaaagatcccgggaactgttgtcacatggtgacagcttatgatggtggctgaggacactgctctttacctttgtgtctcttgtctcgtctctgaatctcaatacctgtaattaagaaggagcccataggagttttatccatcttattttcagatatttaagcagaataaatatattttcacaatcctttgaaactctcttccttcttaaaccttaatgagattccaaggtagcaacaaaggcctttctgatattacctgtacaatcaaaaactgagcttgaacttcctataatttcttctttttggtcaaaggagtcaccctccaactgacatatttataacatgtccctgtgataacgagaaactactcacttatctctgagtctcatgacagaaagagtatcagaaaaaaagatactacaatccttcaaacacacagcagtgtgagacaaaaattacactctaatctgcagttgaacaggttctgtcttccattaaacctgtatccccattttattatatagttgagccagttatatatgactcactgggaaagtgcattttatgatcttgttagaagaaatggtttctctgggatccttttaagccaataattttatacctagctcctcctaaatatctaggacattaacttattagccattccggtgtcaagcctaatgctttttaaatacttaaaacaaataccaggaaactgtgggggttggagaatagattttccataggcatttagtgctttcagagatcagggggatcgatctcaggggatttagtaggaaaagacttgattctctgcttcctctgcacacagagctttcattttatgcaacaggagggacagcatgcatgtgggataaagccaggctgattatttcaaaaccaggctcacatctatttgactgacaaggtcctggcccccggccagggttacagcaccggaacatggtctcttctctgcggctctgctggctgggcctgtgtggaggcgggtggatggggggatgtccaggctgcagctgacagggcacttggagatctcagaaggcagtggaggcttggggactgaaggggacccggcttcgatggggtggggaagcacagcagcttggtaggaaatgacctgaaagagggattcctaaacatgcatgtatgtttgcgtgtgtgcatgaaagcagctgtagatcacaactaatcttttttttttttaattgcaaatcccactcaattcttcaagctttcttggcagcatctgatccagttgatggctttggaaacacttcattcttcattggcttctatagacatctcctcccgggggttcttggcttccctgaccactccatctctgttctctttactggtccttccttctcatccgtcattttaaggttttgttcttttggttctgtccccagctgggttttcttttccctccacatgcctgatgtggtaggcagaataatgaccctcccaaggatgtccatgcccttatccccagaacccggtgaagatggatgttacaaggctaaagggattttgcagaagtgaggaaggttatggatcccaaggtggggagagcatcctggtttatccagatgggcccaatctaatcacatgagcccgtacaagtggaagactttctcaggctgggcacaggaggagccatgaggcagagggagtgacagtgaggtttgaagtgtgagaagtgctggatgacatgccactgcaggctttggaggtgaaggggggcccatgaggcagggcaagtgggcagcctctgaagctgacagcacacaagaagaggaggacctcagcctagggccacaggaaactggattctgccaacaacctgaccaagttcagaaatgtcttgaatcccagagcctccagaagagaacatagccctgcgttcaccatggtttcaacctgtgagactgagcagagagccagccgagtccttctgtgttggacctctgacctacagaaccatgaaaccaatcattcgtgttgttttaatctgctaaatgtgtggcaatgcagtaccacagcgataaaaccaatccacccaccaccaatggtcttatgattctaatagcttcaattaatcctataaactgacagccggtccctattccccattctgctgaatcccaaagcctcacgactttcttctgttaggcaactctgcttggctgtgttaaaaacacatctaaccctacatgttagaaactctgccagctgacaaaaccagaaaccttgagtcagtctggattctttcctctctgttttattcattgtgtaatctcaactccatcaggtcttggttgaaatgtcagcatctcaaatgggtcgcctccgaccacccaatttaagatgacagcccccctcctacacgtaatcgtcctttatgcttatcagcatcagtgtattgtatgtttacttaccactttgcttattattagctgtcttccctcttggaatgtcagcacatatgtgttttattgtattaattctatttaataagtagtaatagagtggtttccaagtgtcaggaactgctctaagcatttttacaaatatccacttatttaatgctgttttttcaccgtcatagctctagctgttagaatagtgcctggcatgtagtagttgctcaataagtagttgttgagcgaataaatgaataaatgaatgactccagcctaacacgaagtcctgtcaattctatttcctaaatacctttcctaacaacccacctttctccatctgtaatgaactaagaaagtggccgtatcattctcctttgtagggcccttgaatggcttccctttgtttgtgggagaaaatccacactcctgcagggattcacacacgtttcttgtcatgccctcagttttctgcctccatctttatttctcaaaactcccctctcatcctctcttgccttccttacatgctaatcttcaatcagcccggacattcagtttccctaatatgtcccatcctccctcttcttccaagcccctgagtatgagctccttaccattggcattccttcctactacctgccctgttctctgcttattctatttttttttttgagatggagtcttgctctgtcacctaggctggagtgcagtggcgcgatctcagctcaccgcaacctccgcctcccaggttcaagcaattctcctgcctcagcctcccaagtagctggaatcacaggcacgtgccactgtgcctggctaatttttgtatttttagtagagatggggtttcaccatgttggccaggctggtctcaaactcatgacctcaggtgatccacccacttcagccttccaatgtgctgggattacaggtatgggccaccatgcctgggtttctccgcttattcttaatattttaactcagctgtttccctcctccatgacaggacacctccctcacctccacctccactgagaaagtgcctttcctggtgctcactgctattctatcttgtcctctgtccttcccctctctctgtgtgtggtaaagactgctttccctgtgcaattctctcaccagtttgcacggttcttgaggccatgagctggagagtacgatccacttgggcatcaagtgcaccagctggcacctagcagggactcagcacatacctgccgagtgagtgaattggtttcccatggcttggtgagccccggccaggcactctcccgagccaagggggacacttgttctgccagtgttgatttgcaggcgcaattatatgtgtaaatgcattttcactgttctgccttaggacccaatttttgaaaattagattttaaatgtcgtattctcctcacttacatcttatgcttcccgacattcagcacataatttaaaatgaaaggcatagaaaattggactcatttagtttactccacttgaaatccatgtgagtctatttttaaattctcctagaccctgtgctcttttagggtgtatttgagaggaaggaagggggtgggggagaaaggaaagaagacactcattgtaagctgttagagatgctgcgtgttattgcactttgttttaatacatgcagttttcacattagcattaccccaaatacaatttctaaagccaaagactgaaattgagactctgccttcaacatttgctgctccatgacgttcttgattgcaatgagaggctggctgtggccagcttgcgggtgcatcacagcagggagctttaacattctttcctctgctttccagctgacatgttcctccggctctgccacacccatcagatggcaggtggggagcagattaagacatgggcattcgcagggtgcacagaacgctggcttacaaacacctcctctcataggcatgcaggtgaacagatgggtgggtgggaggttccccttcacccacagtcctgaatctgagttcttgggttaggatttggtatggcagccttcacattgcacagatatccctacattgggctgctctgcatgcctgcaatgagagtttttgggcttcttgcaggcaggaggtgctgagtattcacaccaaagcttggacatataagacaccagtgacccctattctgctaattcataacactcagccggctcccacattcccactgcctgtgcccatccccgagaggctttcctaccttcctttttctgctttataaagcaacagtgagattccaggagcaaggccagcaaagcgaggtaggagagctcatagataatccaacaaacgtgtatggagagcccaccatggggtgctctccccatgaaacttcaattttttttttttttttagatggagtcttgctctgtcaccaggctggagtgcagtggcgcaatctcagctcactgcaacctctgcctcctgggttcaagcgattctcctgcctcagcctcccgagtagctgggactacaggtgcacgccaccatgcccagctaatttttgtatttttagtagagatggggtttcaccatgttggccaggatggtctcgatctcttgacctcgtgatctgcctgcctcagcctcccaaagtgctgggattacaggcgtgagccaccgcgcctggtctgaaactcgaattctaatgggaaagacaaaaataaaaaacaaaaaatatataattgttaaaaggactgcagaggcaccagtaaaggatcagagagcaaattatcagggtggcagccagccaagaactgtaggggaaagtgccctcaaaggcgggaacatttaagacaaggcttaaaggataagcaagctgcccccacagggagggagcagagcgtgccagacagaggatggggaaagagctcctgcagtggagatgagaaaaccagacgtgtgatctgggggccgggggacgaggtaaccaggggatgagggaaagagggaaaaaacaagcaaggctgaccatgccccacctgaaggttttgggaaggatttggattttattcaagatccagggaaagccagtgcaggtatcaagcaggtttttctgggatctacttccaggaagaaggacaagtataaaaaggtgcaggggaggtgtaggctcctcccctaagagggaacctgctgggtggccctgtagaagacagcagtcatagtttccatcagagctgtgcattcaaccttctctatttcccagctgtgctgcatggaaacagaaaatggcatggccaggccaggggcagtggctcccgcctgtaatcccagcactttgggaggccaaggcgggcagatttacttgaggtcaagagtttgagaccaccgtggctaatatggtgaaaccccgtctctactaaaaatacaaaaattagcctggcgtggtgtcacatgcctgtagtcccagctactcagaaggcccatgcaggagaattgcttggacctgggaggcagaggttgcagcgagccgagattgcaccactgcactccagcctgggcaacagagtgagactgtctcaaaaataaaataaagtaaaataaataaaaaagaaaaaaaagaaaacgccatggccagaggcgccacattttagcttcaggaaactgtgttgaatactctgagttgtaccagcagggacactcccagccgcccataggtccttgtgctgagcaccgggcattgcctccttcctgcttctaccaggaaaattgctgtctgggagccttataacacagactgctggggtttgtgggagatcaaggattatgttccctgtggactagtttgaaaaggttgaaattcagccccttcataatgtcatgctcgtagctaagaaggcttgcctttttctcttcctttgtccattttagaattaactgtggatatcggtaaaagcagcctcaccactaatacatgtggggctggggccgtgatacagcccaaggcccctatactatatatctgcatattttcagagataaatcagtctagtaaatggctaaatatagcatgttctattgtcctaccttgatgctttaaaatgtattattcaggcatgatgaggccaacagatcaggagacagctgccattgaaaagagtttgttactcacagttcccaagggctgggacatgccatgctatgccaggccacatggcgatgcaccagcattggtgaggaggtagagagagtgagggggaagatgtgggcaagagtattgcggtttctgtgagaaggaatgggaaaggcaagacaaccaggcttgggattagctagtttgaataacttccgtggactctggagtatagggggtgtccctagttatctgatgccaggggcaaaggatagtagcccagcatgtgagaccctagtacaggaggtggttgggggtgtgggttctggatttcttggttatcctagcaagggtgtgctcacaggttagttgtttactctttctaggaatgaccctgggaggagcagtccctctagagtcagcaaggccccaagatgtcaaagcatcataaaatactgaaaatgaaaaagaacatgattgttgacgaagaacatgacttgacaatatgactttttttttttttttttgagacagggtctcgctgtgtcacagaagctggaatgcagtgatgcaatcttggctcactgcaacctccacgtcctgggttcaagctattctcctacctcagcttcctgagtagctgggactatggacatgtgccactacagctggataatttttgtatttttagtagagatggggtttcagcatgttgaccaggctggtgttgaactcctgacctcaggtaatccacctgcttcggcctcccaaagtcctgggattataggcatgaaccaccacacccagccacaaatatgacttcttaatgattaatgattaggagaccaggtatgagtttagaatgcttgaattccttggactctatatcagaaagcagaggtgccagagcactggtccactgaacccagcctccagctctatttttctgcacatctctgttttccctcaccatgactgtcttgcagatttgtgcacagacactccagcatgtgtgtctgagttttgtctacctgctctgtggtgggggcttggatgcactgcccagatccttcttctggaaggaagggtcaggtttctgcagctactcccagctgtcagcctttcaggtttgtgggggctaaagaaaatggccttgtccaaagttgcatctggatctggtatccaatcaatgcagaggcataaaagccttgtcccttgtgctaactcggaagaagggctccttggcttcagagctccctgtgggttggctggggcatttgtcagatatgctttgcagctccgtgcaatcctgcctcttctctgcactttcacaggtggtaagcagaagagactccctaataagcatccagggtgttaaactctacctcagggtcagcttcctggggaagcccacccaccacagtccctttccactcactttccttccacatacccttaacgcagcaagccccctgcaccctcaggcctaggaaagcacagactggccatactgtgcacactcagaagcctaagctggcaaagaggcttgcttgagtttaagaagcggaagttacaatcctaatctctgataaaatagactttaaaccaacaaagatcaaaagagacaaagaagggcattacataatggtaaagggatcaatgcagcaagaagagctaactctcctaaatatatctgcacccaatacaggagcacccagattcaaaaagcaagttcttagagacctacaaagcggcttagactcccacacaataatagtgggagattttaacaccccactgtcaatattagaaagatcaacgagacagaaaattaacaaggatattcaggacttgaactcagctctggactaagcggacctaatagacatctacagagctctccaccccatcacaaacttaatccatcacataaataccaaatacattcttctcagcacctcatcacacttattctaaaattgaccacataattggaagttaaacactcctcagcaaatgcaaaagaatggaaatcataacaaatagtctctcagaccacagtgcaatcaaattagaactcaagattaaggaactcactcaaaacctcacaactacatggaaactgaacagcctgctcctgaatgactcctgggtacataatgaaatgaaggcagaaataaagatgttctttgaaaccaatgagaacaaagacacaacaaagcagaatctctgggacacatttaaaacagtgtgtagagggaaatttatagcactaaatgtccacaggagaaagcaggagagatctaaaattgacaccctagcatcaaaattaaaagaactagagaagcaagaggaaacaaattcaaaatctagccgaagacaagaaataactaagatgagagcagaactgaaggagatagagacaagaaaaacctttcaaaaaatcaatgaatccaggagctggttttttgaaaagatcaacaagacagatagaccactagccagactaataaagaagaatagagagaagaatcaaagagacgcaataaaaaatgataaaggggatatcaccacctatcccacagaaatacaaactaccatcagagaatactataaacacctctatgcaaatgaactagaaaatctggaagaaatggataaattcttggacacgtataccctcccgtctaaaccaggaaggagtggaatccctgaataaactaataacaagttatgaaattgaggcagcaattaatagcctaccaaccaaaaaaagtccaggaccagatggattcacagccgaattctaccagaggtacaaagaggagctggtaccattccttctgaaatgattccaaacaagagaaaaagagggaatcctccctaactcattttatgaggccagcatcatcctgataccaaaacctggcagagacaccacaaaaaaagaaaatttcaggccaatatttctgatgaacatagatgtgaaaatcctcaataaaatactggcaaaccgaatccagcagcacatcaaaaagcttatccaccacaatcaagtcagcttcatccctgggttgcaaggctgtttcaacatatgcaaatcaataaacataatccatcacataatcagaaccaatgacaaaaaacacattattatctcaataggtgcagaaaaggccttcgacaaaattcaacaccccttcatgctaaaaactctcaataaactaggtatcgatggaatgtatctcaaaataataagagctttttatgacaaacccacagccaatattatactgaatgggcaaaaactgaaagcattccctttgaaaaccaacacaagacaaggatgccctctctcaccactcctattcaacatagtattggaagttctggccagggcaatcaggcaagagaaagaaataaaatgtattcaagtaggaagagaggaagtcaaattgtctctgtttgcagatgacatgattgtatattaaaaaaactccgtagtctgagcccaaaatcttcttaagctgaaaagcaacttcagcaaagttgctgttatcaatgtgcaaaaatcacaagcattcccatacaccaataacagacaaacagagacccaaatcctgaatgaactccctttcataattgctacaaagagaataaaatacctaggaatacaacttacaagggttgtgaaggacctcttcaaggaaaactacaaaccactgctcaaggaaataagagaggaccaaacaaatggaaaaacattccatgctcatggataggaagaagcaatatcatcaaagtcaccatactgcccaaagtaatttatagattcaatgctatccccatcaagctaccactgactttcttcacagaattggaaaaaactattttaaagttcatacagaaccaaagaaagagcccacatagccaagacaatcctgggcaagaagaatgaagctggaagcatcacgctacttgacttcaaactatactacaagcttacagtaaccaaaacagcatggtactggtaccaaaacagatatatagaccaatggagcagaacaggggcctcagaaataacaccacccatctacaaccatctgatctttgacaaacctgacacaaacaagcaatggggaaaagattccctatttaacaaatggtgttgggaaaactaaccagccatattcagaaaactgaaactggaccccttccttacaccttgtacagaaatcaactcaagatggatcagagacttaaacgtaagacctaggaccataaaaatcctagaagaaaacctgggcaataccattcaggacataggcgtgggcaaagacttcatgtctaaaacaccaaaagcaatggcaacaaaagccaaaattgacaaatgggatctaattaaactaaagagcttctgcacagcaaaagaaattatcatcagcatgaacaggcaacctacagaatgggggaaaatttttgcaatctatccatctgacaaagggctaatattcagaatctacaaagaacttaaacaaatttaccagtaaaaaacaaatagccccatcaaaaagtgggcaaaggatatgaacagacacttctcaaaagaagacatttatgtaacaaacagacgtataaaaaaatgctcatcatcactggtcactagaaaaatgcaaatcaaaaccacaatgagataccatctcatgccagttagaattgcgatcattaaaaagtcaggaaacaacagatgctggagagggagtggggaaatagggatgcttttacactgttggtgggagtgtaaattaattcaaccattgtggaagacagtgtagcgattcctcaaggatctagaactagaaataccatttgacccagcaatcccatatacccaaaggatcattgtactataatcattctatgataaagacacatgcacacttatgtttattgtggcactattcacaatagcaaagacttggaaccaacccaaatgtccattaataatagactggataaagaaaatgtggcacatatacaccatggaatactatgcagccataaaaaaggataagttcatgtcctttgcagggagatggatgaagctcgaaaccaccattctccgcaaactatcacaagaacagaaaaccaaacaccacatgttctcactcataagtgggagctgaataatgggaacacatggacatagggaggggaacatcacacaccggggcctgtcgggtggtggggggctcgggaagggatagcttttggagaaatatctgatgtaggtgaccggttgttgggtgcagcaaaacaccgtggcacgtgtatatctatgtaacaaaactgcatgttctgcacatgtaccctagaacttaaagtataattaaaaaaaaaagaagtgctcccagggacatttgggcaggaaattcccgtgttctgggtaccaagaacacaaaccagaattgaaggggcaaatcttttggccatgtgactgcctcaccatgcagaggggcattctggaggaatctggaagtgagggttctctatcatgatgcccagggcaggggcccctcttgggcaggtccaagggctattctagattgaagcagatattcaatcatttgtatttttcctgtgttaatttttttttttttttttttttttttgagacagagtctcaactctgttgcccaggctggagtgcagtggtgcgatctcggctcactgcaacctccgcctcctgggttcaagcgattctcctgcctcagccttctgagtagctggcattacaggtgcgtgccaccacgcccagctaatttttgtatttttagtagagacggggtttcaccatgttagccatgatggtctcgatcttctgacctcgtgttccacctgcctcggcctcacaaagtgctgggattacaggcgtgagccaccgtgcccggccttcctgtgttaattttttacacatacttgttcatcacccatgtatctatcacctgcatattaaaggagaggagacctctgtgtgtgtcttactagccggggcacgttgtcttagcatctttggcctctaatgagactatgtttataagcaaaaggtgcccagtcaggcatagtgaggccacttgggggtgagggccggtgcctggatgtggacagcatgtgtgtgttttgaggtgggagtaaggcctggagtgatgaatggaactttatagccaacaaaaggctttcctcaaatgggaagttgttctgacctcactttgtgcctctgcttggccaatttggcctttttcctgccaaatccatttggcataaggagcaggcagtatttgggctggctgcttgggaactttgtaagacagttgaggagggcacctccagcctggaaaacactgcgtagtccggatctggctgccttacgggggcgccatccttggccactgagcacaaactacgtcttcctgctagtgtcccagcagctctcccaacagcaacagctcagaccacccatcagacccacaagctcgtgtgtcttttaacagttgcatatgaaaagcctctgctttagagggaaaagtaaattctttccttttgcgaaattccctcagtgaaattcataaattatgtttcatcacaactgggcaacaatattgtgtatttgtaaaaacagagcctttggcataaaacccaagtgggtctgaattttttatttactccttgaaataacttctcccagccccagtctccttatcctcaaaagggatttagagagttattgtgagaattaaacaaaataatgatgcacatggagcatcctgccagcactcagtgtgagctcacttttcctagcttaagaagatcaagtgtggattggggcttgttttaaacacaagttgtttaagaagatagtattccacttttaaaacaaagtcccaaattttcttccttcttctgtctataaaaaagaatgaaaaaaaattctgtgtgtgtgtgtgtgtgtgtgtgtgtgtgtgtgtgtgtgtgtgatgcccatatttcagggaaataacaggagaaagaatcaaagaatgagactgcatattctcagttgcatactactaggtaagacagtaaataggcattctaagcaatttaaaaaatactgtaaattaatctccaggtcacaactctttcagttatatgcgccagaaagcaagaaagcaaacccaaatatgcctgctgctgtcagcagggattgctgagaaaagttagcctgtctttccatttagaaaaagcatttgacaaaggcacgtgagtgggaggctgtgaagtgaacctgcttggaactgatagtgttagctttttactgacctgctttccataccgcaagcatttggtttttcttttgtcattgacttgtgcggatttattagactgtgtgcttcaagggtgtcaggagattgcatgtaggagcaggtctgaactgggaaagtgagaattaccatattagatgatacccaattaactagtgacaggcacagcaggtaaaatcggtacctgggctttatctactataagcactcgccacatagcaaacatttttaaacctggtggagcttccttactcatttctcctttccttcatcctgcccactctcccttcctgtctaagcaaggagctgtgtctacctatgtaagtatcaagacagacaggtctttgagatgtgctccagggttcaagggcaatggggcagaactctctgagggtggtgactcactgggaagcaacagccacacaccaccccacaggacaaaacagtggaagtggaggcatcaacatagttcagaataattgattttacttttttcatggacaactgagtcacaggatgatgtcccagttctgaaaacactttctcactctctgttctttgggtacctttgccagcatgaagttacttactataactcagcattctcactcgcgttactcaaaggtgaaaagctggaagaatgagttaatcttacttccacattcaaatgtggctattagggcagtgatggaagctcagagcctgtgcttttggacaggctgatttcctgtagctactctgtcttcctttggtgtgggatcatgtagtccatctagtgatcataatgtaagcttggagggaaatgatttggaaataattgggaaggtaaaatgatatgacatgaaatgcctgctattctaaaacacaaatcttattttatgtgcaactgctgttttggattatccatgcctcctcctgcatcagctagcatggaaaatcctttaagatctctaactcagtcacttcctcagggagtcatgtttaaaccccctcaagctgggccaaatctccctccatgacgctctgagaatgactgctgcttttatcattgaatctaacttgttgcttttattagtcatctattgatgtgactctttctgttaccaagcctgattttcttaagcccacgggcagcgtgatattcacctctgtggccccagtgcctaacatggaatctggcatgtgttaggcatttaaggaacattagaggcagggtgtggtggctcacacctgtaatctcagtactttgggaagtggaagtgagaggactgcttgaggccaggagttcgagatcagcctgggcaacaaagtgaaccctcatctctacaaaaaaattaaaaaaaaaattagctgggcacagtggctcacacctgactcagctattcaagtctcagctgttcaagagattgaggtgggaagatcacttgagcccaggagttcaaggctgtagtgagctataatcacgccactgcactttagcctgggtgacagagcaagaccttgtctcaatgtctcaaaaaaaaaaaaaaaaaaaaaaagaaaagaaaagaaagaaaaagaaaaaacattagatgaatgtatgaatgacagtcaggtataactccaaagagaaaccctttccctgttaccacttattaaatcagtaggactcatatctgttaattttccttctctctgtaaacatcttatcaacatcagagaaaaagagacagagaattaacaacaacatactgaacgatgccctgacaatgagaaatgaatcccttgctagtttggtaatgatgcatttatttggctctggatctagagaatttatattgagtagtcaaaagcctgggaaggactgaactctgttgaactcagaaatcctctcttgagagttctagctaaactagaactaccacagataggtgatagcagaatgctatatttgaaatgctgcaaataaataaatttatacatgcaaatcaaaatcttttagtaaaatcacacaattaacctctcactggggagaaagagccaatgtagatatatgctttagaaagttgttaatcattttctcattgcaacctactttgaaatcaccttggcctattgtctctcatatatatatgtttatatatatatatatatatatatgtatatatatatataaacttattttacacaatgtagatttattttatgctgatatactagtaatgttcttccctacattttacaaacaatgagattttcatttattgatggctggtctttgcaatggtcagtactctttgtaactctgactttttacagcacagcctttggcctcccctgaatttagtgtctttgaacacctgcttcattttgttggtgctgagatttcacatctcatgtgcactaactgctgtcatgttatatgaagttgaagtcatgtgttttgtaacaatgagctctggaactatcccttactggcagtgtgactttgaaccttactgctgctccatttaaccaactgtaaaatggtgataatggtagagctgcttcactgatactattatttagttcatgtttagaataaggtgtttaaaacaggtcttgcaaaagaaagtgctcagtaaaatggtagctaaattgatatcacgcgtgtccccacagtgggtctccaatgtgacagtcaatatcatttgcgtatgagcagacaaaactctctaggttttaggggttcatggttgatatttcctttttgcccttcagtgtgaaatttcactcacgtaggacttcatggaaagaatctaccatctttcaaggacttacacaatcttatgccatcctacctgccaagacattccagctgcaagtccattttcctgtattgctgactttcctgggtcttttcaggattatgttacctcttcatcctcatgcatgatttaattatccgaacaaaggttctttcattcactcgaagacagcataataccttagatatttgaaaatttctcagagttctaaaatttctcctttgtctttcacatcttccttctgaaagattttactaagtgggagttaattttatctaaattgattcttgaatattgatctttgaaatctgatgacttattttcataaatgtaggccaggtctcacttggtacttaatgttaatttagaaaattccaataacgtggctaatgtttgacaaactttgccattaatgctaaactggggaggtccctttggcttccattttcaaaggtgagatcgtatcgtactgatcccgtctgaggatgccttccttattaattgagggtggtggggctggagtttcttcaaatcactggtccattcaatctgatagcaagtctgcctgggtgttactcatttcccatgctattttcatgtcaaatactgctgtccccttatgcaagggatacaattcattgaaacctcgttggacttcctcccacttaacattctcctaccttccgtgttgacattcttctaccttccaacttccgtgtttacactgaaaaagctgttgctgggtagcttggttattttttttcccatcagactcatagggatatttttggattattggttatgatgaatatttatggaaaatgttgctgtgcactccagtgagaaatcagtgttaaagaggctggtcccacagctatctctgtgtccctggaagccgtgtcctttttctatttaattagtgccaagtatatggtcttgcatgaaggaggacccagattgaactcctgtagcatgatgtgtgtttcatgcactctactgttttcactgatttatggcatttaattatcaatctgttaatccaagtttttgtttaattggattcatcaaactaattgtatgaattccactctgttatcatggcctgaacctgaatatcagattcccttaataaacagaaacagtgaatgtgttcctgcttcttcctgatcaggaagggggtctgcagtcctctggtcttgtttgtttcgtagcatttcattttgtattcagcatttctttgagcgccctctttgcttcttggaaccttgccttactaccattgccattctcataggtccctgctctactggacctaaaatggtagggaagaaaggaagaggaggggagtaagaagagaggaaaaggtgagctctattctccgtcagcgtgtctgtggctgtattgattcggaagtttaaaatctaaactccctgtctacagtcttggcctgtcttgaaggttgtgagtcaacttagtgaatacatgcaaggtacttttaggctgtctggctgggagataagttgggtccaaagaaagtaatagttcaacatagcattctccttagatggcagcctccaggcaagaagaaaagcccatggctttgcctggaagttcttgtgcaggtccagcgtgtcaccaactggtgcttcagacactgagatgaggcaaatacttagcattcagtttcttaacaaagtgattaacttgatagacatctagattctttttaaacataagaatatggctttcttttcttcaggtggtgtgtccatttttgtccatcggatagaaggtgctatcacaatataaatggcgcgttgcgtacgatcagcaagggcttcttaagttactcccacttccttagtgatactgtccagtctcattgcttcaaacgccaatcccaaatgtctctgttccagaactttcccaaactccagactcagatatccaacctcacacttgacatctccactgaatttctaaaaacttctgaaatttaacaaatccaaagccaaattcttgtctccccaaacccatttcacttctcattcttcccatctcagttgatggcaatttctgttttttttctggtggcttagggtaaaaatctgtagtcattcttgacttttttttttttttttttggaaacagagttttgctttttgttgcccaggctggagtgcagtggcacgatctcggctcactgcaacctccgcctcccacgttcaagggattcttctgtctcagcctcccaactaggtgggattacaggcacccaccaccacgcccagccaatttttctatttttagtagagacggggtttcaccatgttggccaggctggtcttgaactccagacctcaggtgatccgcccacctcagcctcccaaagtgctgggattacaggtgtgagctaccgcacccagccaacttttctttttcttacacctggcatttgacccaccaggaaagctattgtctctacctttaaaatatatctaaaatctgcccacttatcactaactcctgctaatgcactagtttaagtccctattgggacatagaatatgatactacaaagtacagcaccttggaaactgagaaaacagcagaagcagaaagggtactctgaccatctgctgtctttctgtgtgagctgatcttaaaggactctcttgcttaccttccctgaaaggtgagcataagacccttatgtgacagttgccctgccccccaatgtggagggaaggaatgctacacagaggccaaggagattctgaacaaacagccatgctgagctccagtttatcaccattagatcatgtttttgtccaatcacgtttctacacagctgtccatttttcatatgcttcattgaacctaagcacaaaaatagacagttttctctgggtcttggggtcttcatctctgaaggctcctatatcacataaaactttggtcacataaatttgtcatgcctttctcttgttaacctgtcttttgttataggggtgtcagccatgaccctggtgatgggtgagaaaaaatattctacttttcctcctccacatctccatcatcttttcctggacgattgcactaacctcctccatgtctttctgcttccaccccatcctcccttatggtgtattctcaacatagttgctgtaggtcaatctcatttttttcttctacagtgtttttccattccactcagaacactcaaaatcctgatagtggctttctagttactacagctgtgcaacaaaacatccccaaacttaatgacttaacatcaccattaattatgtgcaaaattctgtgagtcaggaattcagacagggtatagtgggggggacttgtctccatcctgcgatgtctgggtccctcagactcagaggcactaaccacctgaaagctcattcactcaggtatctggaggttggtgctggatgtattctaagaccatcacccaggttttcagcttaaacacctacacagggcctctccatgtggcttgggcttcctcacaaaatggtggctgggttcccaggacagagagccacgcagaaactggactctagcctcagaagagttatagaatcccttccatcatactcagtgggttggagcagtcacagcctgtccacattcaagaagagggaaatagtctttacctcttgatagggagtggcaaggttctggaagagtatgtggtaccagaaatattgctgtggccattttgagactatagtctaccacagtggcccgcttgattggacctgggttgtttctctgccttcatcttttctccctatggaacatttggctccggccacacttgctagagcatgcagatgtgcttctgccctggggccttcagactgcctactccattcacaagatgcctgttgatgccctcttccctccctccgcaaacttttatggagtgtcatttccccagtgatgccttccctgaccactctacagccccttttcacttgctgtctttttttttccccttaaatccttattgtcattaccaccttctaatgttttatggaatttttatgtttattctttagcatcccttgctgccagaatggaagcactacagaagcaggaatctttacctcttctgtccactgagctatctcacatgcctagaacagtgtgtggcacataaatatgtatgggatgtgaaacagagagggcgtttctggtttgggcatttggaatttgcaataattgctccagctagcacaactaagtttgtgtgttagaccagcataagtcaataaaaaaagataccaacttaaacagttgttttcattgtgtaaatgtctctttttatcttttatggactaatgaaccagaatgtttaattgttttaatttccatctaaatatttagtttctttatgaggaatggcagggtactttttccagttccacagtccctcaccttacacatacacgttgactgaaatagaagtctaagaatccccagacactccagtagcatgaatctgggcagcctggcttctgtgtttccacattctccaactttagagtacatgagcccttcagcataaataacccttcagaataaaggttgtaataaaaacaatgataaaacccacaataacaataataatactagtaatagacatggcagcaccattgataattccagccaccatttgctagaaaccccttggctgcaggtgttcttccaggcacttggtgtgcacgtctgttagttattatcttgagaggaaggcaccttcattcctcggatgagcaaaaggggagaacttgttcaaagtatatcaaatctcttttatccgtaaagtgcctctttgatctgctgaaccatagcaatcattcattccttcaacatttggtaattaggaagcgctgagtttatctcaaagagtagctgatctcatcactcattggatgttgagcagttgatttctagttactggcagaatcccatgtttatgtttatttctcaatgaaaggttccacaatcctcctctacccctagtgtggctcttctggttcatctgtaggatgggaatcattacactgtcaggttctctttccctgtattggacaaccgagccaatggctatcagttgggaaaggtaagagatagagcacatgtcatccagtgatagactatcagtgagctgctttttaaagactacagcaaggctggctcagcgctattgctccagcctctgactttctcctgcagagacactcagagccccggaatcctccccaactcatgacttcaggcagccactccagtggatttgagtgttttccaaacatagaatgttacgattactagtggcttgacctcaatcctttggctttgagcttttagttgaatggtttttattcaattgtgactgcagttgcattaactttggatttcctttttttcccccagaaacaagtgtgaaggaaaatactatgaagtacatggaaacacttaagaataaactgtgcaggtaaggataataatttctgtatttcagactccgtagcacatctagattctttattataacagaatttagttaaatcgatgaaaaaggctggccagtttctctaataaattaacaaagaaagacacaaaaaagccttttgaaccccatcagtgaaagagcaggtgccagccctcatcttgtcttttaaaaagtaagtagattaagatgtttaaaagtgtcttggagagatcacaggagagttttcatgttccataagagaagaatcttctttactatattaaattcagaattcattccttagtctgtttttcccttttttaaactttagtgtttgaggggggtcttaaggattttaaggcggtttatacatggtttggaataatatagaaatgcacgtcttaggttctgttttgaatcctgaatcaaaaccagcatgaaaatttctggttgctttttttaaaacccaattaggaattcatctttgagaaatgtcagggatgctgcagcatgacaagatgtttctggcttttgtggatgtgtgcttaggaaaataaatcccagtcatcagaatctgttcctaattaaggcaacaagtactagagtggaatatgcgctttcttccctggaagtcatttagttttatggagaccattttgctattattttggaatttgttaagtaactctttagataggctatgccttaagcctttgtctgctaggacgctgtcttgagctaaaatgctgcttttccattaagagatgttgagagggcctgccttgcagagccctactcttcagggtaagcaaggcactacaggatttattctcatccttggaaagccgtcctataacctcctgattgatctttccctgcttcccatgctcctagacttgggaagaatctatgacacaggtggttagcagaggtgagcagaatgaggagagcttgcacctgggtcagatgctccgctctgagtctggccttcctcctctcgcatgtgttcggggcagatttctggcacatccttcttgatctcaactgcagctgccattgttttagccatcagcacagcacacaccgtaagttacattaggttatcaggcagccagtggtagccataagcacgtgggtattggtaaagagacacccatttaaattgcagctctcccacataaaaactgcctaaccttaggtaagtgctcactttctgttcagtttgttttgttttgtttttttagctatataactggaggaaaggtacctacctccccagctggtgtgtgaatttaaataccatatgtaaagcattcatgtgattggtagtaggcacgcattagtttcctttaccttcttcttatttatttatttatttatttattttgagatgaagtttcgctcattgcccatgctgtagtgcaatggcgctatcttagctcactgcaacctctgcctcccaggtactagcgattctcctgtctcagcttcccaagtagcttggattacaggcagtgccaccatgcccggctcatttttttatatttagtggagatggagtttcaccatgttagtcaggctggtcacaaactcctgacctccggtgatccacggccttggcctcccaaagtgctgggattacgggtgtgcaccatcgtgcccggccacctccttctttatatcattagaactgattggacacttatgagtggaaaaacacaaactgcttttcctctgttctcacacaatgcaataatcaacacagaaggcttctgtgatgaaatacatgagggtttctccccaccaaaaagtaagcaatcagttctgctgcagataccagctgggtgtcctctaactcatttccgacaccagctacctggagacagcatcagatgccacaggttgagggctcagtcccacaagactgccccacttacaatgccaatggcaagcccaggttgttttgcctgggcttctgaccaaccaactagaaattgggattcccatgatcccctccttgggtttgattaatttgttagactggttcatgaaattcagaaaaacacttatatttactggtttattataaaggaggttacataggatacagaagaagagatgcatagggtgaggtatgggaaaggggcaccaagctttcatgccctccttgggcacaccatcttcaaggaacctccacatattcagctatctggaagctctctgtaccctctcctcttgggccttttgtggggacatcactggataggtgtgactgaagtatggacaaccatgtagcaatgtgattggacagaaactgtgacctaccacaaatagactgagtgggaaaaccccacagggcctgtgtgttcagattccccagcttctctgtgcagcgtttcttccttcaggtgtgggacaggactccttctgaaatgagggtctatgacctacagtcagataaggtaggtcagagaatttctttccttctttctttttcataagttcaacttttattttagattcagggggtatatgtataggtttgttatatggatgtatcgtgcgatgctgaggtttggggtatgattgatcctgtcactcaagtagtaagcacagtacccctggaattagttttcaacccttgcttcccttcctcctctgtcagtctccagtatctattgttcccatctttatatccatgagtacccagtgtttagctcccacttgcaagtgagaacatgcagtgtttggtttttcgttcctacattaatttgcttagaataatggcctccagctacatccatgtttctgcaaaggacatgattttattctttatatgactgcatagtactctgtggtataaatgtaccatgttttctttatccatttcaccattgatgggcatctaggttggttccatgactttgctattgtgaatagtgctgtgatgaacatacgagagcatgtgtctttttggtagaatggtttattctcttttggatatatacccagtaatgggattgctgggttgaatggcagttctgttttaagttctttgggaaatctgccaactgcttctacagtgactgaactaatttacattaccaccaacaatgtataagtgttcccttttcttcacaacctctccagcatctgttgttttttggctttttaataatagccattctgactaatgtgagatggtatctcattatggttttgatttacatttctctgatgattaatgatgttaaactttttttgtatttctgttggctgcttgtatgtcttcttttgagaagtacctgttcatatcttttgcccactttttaatagagttatttgttttttctttgtcaaattgtttaagttccttatggattctggatattagacctttgttagatgcatagtttgggaatattttctcccattctgtaggttgtctgtttactctgttgataatttctttttctgtgcagaaatggtttagtttgattaggtcccacttgtcaatttgtgtttttgttgcaactgcttttgaggatgtgggcatatattctttcccaaggctgatggaaccataaaagagcctgaatatccaaaacaatcctgagcaaaaagaacaaagctggaggcaacacgttacccaacttcgggctaaactgtaaggctacagtaacaaaaacatcaaggtgccggtataaaagctgagaatttctttatggtcagctccaagacagaaaggcagggggagattagggtatatttttagtttttatgaactgcctaggggagaaataacagtggatgtgggagttatgagccaggaattgtagatgaaaacctatatacataatttcaacagtcatgcttggaactcatcctctctccctccatgtcagctcctcctcctgttcatccagcccaatgcacggcccaccacccacctggctgcctgggtgggcgggcaccatgggctcatgctggctcaccagcctcctttctcactcagttcccagtcttgtcagtcttgcctctttagcatctcacaagcctgcctacctttatcacactgacattgtgggcccctcttctgatcataatagcaacttttcctgctttgctgttccactgttgccctcttaccaccttctccaggtggttttgagtaagcatcttaaaataccaatctggtcattgcacaaggctgcccgatgtcctaagcataaagcctaaatgccttaccatggttcatggcattcttccatgtggcctctgcatgtacttgattatcacccatcactaccccatcatcaccctattgtagctgatacttgttcccttatgcttcccaatgccattgcatttttttttttctggaaagaaactaatttagaaggggacatggttaaggagtatcatccagagaaatattcgattgaatcatgtgaaattgctgatatttcaccatttttgacctagaaaaatgacaatttcatatagttaacccaatatttagggatttgaagtcatcttcagaagggtcagatgctgtggctggtctccttgcccttgacacacaggcatagtttgctcccccacccctctgcatgtgccctggtgggcctctcccagcccacccctcaccctcaccaggccttcccattcagccttcaaggtttagatttctcctctgtgcaaccttccctgactaaccaagactgagtaatgtgcttgcaatgatttattctcactttccaagtgctccttgacaggtattataatgtagcaggacaagccgcagacaaaactcctcagacgctgagttaaagaaggaaaagctttattcggctaggagcttcggcaagactcacgtctccaacaactgagctccccgagtgagcaattcctgtcccttttaagggctcacaactttaagggggtctgcgtgagagggtcatgatccatgtgagcaagcagagggtacgtgactgggggctgcatgcactggtaattagaatggaacagaacaggacagggattttcacagtgcttttctatacaatgtctgaaatctatagataacataaccgattaggtcaggggtcgatctttaactgccaggcccagggtgtggcaccgggctgtctgcttgtggatttcatttctgccttttagtttttacttcttctttctttggtggcagaaattgggcataagacaacatgagaggtggtctcctcccttaataagattaagtctgccttgttcaggactgtattctcagtgatttgccagtgctggatggtacaggggttcccaataaacatgtattgaatgaatgattgaataaatatgtgaattaatgcaaataatttgtaaacatcctaggctcatcttttgtcatctccagcctctttctctgcctctccagccatgctgacgttgcaaagccaccttgcccctggcctcttgactcacataccttagctacctaggatcctgccacagtctcaaatgaccgtgatagtagctggcccttcctgtagcctggagggctcttttcatgctatttcaagctattatgaggcctgggtcagatttgtgtgaactggtatggtgtaaacaatggaacagggaggagaaaaagcagctaggagtctgcaacccctctggcagtaggcaattctattcccacttcagaacaggaggccagagtggatgctgcaaaagcctggtgaccatcaggctctctgtgacagagcccagtagttatggttgttttcagacactctgtgggctccactgataatctgtcaccttcacagttcctttccaagaggatcaacattttacaataggaaaacagttttaacacctgacacagtggtgcatcttagtgactgcttgattaacatctcaagttatccattaaagaagatgaaaatctttacctgttcccactgttcagcgtttcttggtcttacaggattttagagaggaagcagctgagaacagaatggattgctccttttccattagaatgctggagagcatatacttaaagatcagagctaagaaacctaaatctggctagtcaccattttggggacaaattcaaatgatagcactatctttgttactctttcaaagtatacagagacctgaagacccagatattgaggcaaactcaggtggactcaagatctattctctatcaagtatatcaagtgagttagaaagtgaggaagtatctgatgctggcagtggttcaaaagcacatcttgcataactcaaagcaaaaagtggacaaatattacatgaggacttttagtgtatgtttaaataagggtttgccttgtaatcatctgagttataagttagatgcatgtattcctgttcctccttctacaaaggagagattccatttgtggattttttttccaatttccacctgttttaggaatatccctccttctccttatccatagccaaatatccaggagggtgactgcggtcagtacctggtcattccatagaggctttcctctgcattcccatcactactacctgcaacttggcccattaaataatctcctaacagcctctcttccctcctggctcacaacagtttagtctgctcttctcccacagccagaatgactttattaccatcctgttaggctcctttcgcatccagcataaattccacagtccttgttatgtcctcctcctctctgccccttgggctcttcatgaggtggttccaggctactggtccaacctcatctctgtaatcctcatctgcaccaggtgactgatgctccattctagcccatttccctacattaactgtgctccacagcagcacctttgcagagccctccccgacctagcccctgtgctcacactcatccttatgactcagcacaattgtccttctctataaagcctttctggcctcctgctatttcctgcatggtacccatagtggtagccatgtacacgaatgtgttgcattcactcagtctgtctaattctattagactgtgagctccttgtagatggagcctttacttttcttatattccaagtggtattctaaggtttccatgccttactttccttgtattctaagtggttgtcgtgctgtttggcatgtagtcaacagacaaattgtatttaatgcaagaatgaatggataaatcgcaattttatcttgttcctccttggaaatttatttgcaacttgattatcttgacactatattctcaactattacattcagaaagtcaaggcaacctgagaagatacagtgcccaaatccatttgtcttgccatcaaatcttagtggtatataatagaatagaaaaaaacgactcttaaagagcttgacccacttactctcactccttcagggttattgtttccagaggtgagtagttaagtgtgattttctcctagcttgttttctcttatggccaaaccttgctttagtttttattttctcaattattacatattatctgttatcttttttaaagggtcaaatgaaatattcagaaggctttactttatagatgggttcctgttgaaatggatcttatatctctaaccattgtacaggaggaattcattattgcctgatggcaaactcatgtctctggaccaagtgggccaagccctccccctgaggatgggtgtagtggttccatttaactgatggaatctcttgtatgcatgactaatgtgaacatttctcttctttctagaatctcttcattctaactctactttttttcctgaagttcaacataaaacctttaccacgaactcttgagcacttggtagattataagtgatgcttgcgtccttgtcctctagtgaacctttaccacaaactctcgagcacttagtggattatagctgatgtttgtgtccttgtcctctagtgtgttcctcaagtgtttgcttccagtgtgcatcacacttttatcatcagaaaagacaaacaaaaaatcttttaactctgttttgaacatagaagaaagtagttggatacctccttggaggcccttcttagctttagaaggaactgtcaagaactcaatggtcttatctgaaatttgctttgaaatttagagattgatgtatttttacaaagatgatccagttctctttttaaaaactaatgtttactttttaattattaaaatttcaataggacagcctgatgtggaatgatagccaggtgaactcaccctgctaatgaatgtccagaggtggccagcagggtgagcagcacctgaaagaccaaggtctgttccctcacccaaggctcccagagcctgtgtgtcatggccaaaagagactgtaaactgccaactgctctcaatctaatgaagacgggaaccggggtcaaaaattggagcaattgtttccaaaacaggtgcacacaaaacagtttactggagtgtgggaagaacatattataatttctattttatgcttcaatttcatccatttatattttatcttcaaaaatgttttatatgtatgtagtaatacatgtataccacttgtgaaacaaatattggagtttcataattttcttactgatgagtgcacacagtttaaattagagagtgttgaaaaaatattcatttacttatgttctaatattaaaccatagcagtctccataaaatattcactgtcggatttatacacttttgaactttgaagctatttgactattttgaccaattttacaagagaaacaatgatttacattaccttatcagtttgaaatgcaaactgtaagaaaatataaagcgcttaattctacaaagttaagtgaaatcattaatttgataatcattgatttttgcatttaacttttaccttatctcatcagaaaaatcttaagtatgcttaaaataataatgcataagctaaacatacgcagagaaaaactgcataaaatataacaaaatggcgtgaattaaaaagagtaaaaaaggaaggaaaacaaaggtaggaaaaacattagtaacactttgatggggattagactcaacaccatagtagttcactattctagacactcaattaagtattaactgatatgtatataaaactaagtaacactttacaatgtaaaatgtaaatgatataatttataattaacttttctgcattggcctattggtcattataatactttccattctataagaacccatgtaatgaattttaactcagaaataactttcccaggaaatgttcacttgtgatggaatttagtttccagagtactcagatcaattcaaaaaatctgcatgcagttcttcggagagagaaagcagagttccatcttctagaattccagctccctgtgttaggaaagcctttccttcaaaacaagaaaagaagccgccaaccccgaattggaactggcctcttcacatctggaccacaacatgggaggcggaggcaactcttcccttctcggtaccctgagcagacgtaccagtcacagtaattaatataaaaggtgtccttcctcttgaggcatcacttttaaagcaaaaacaagggaggctgaggcaggagaatggcgtgaacccgggaggcggagcttgcagtgagccgagatcccgccactgcactccagcctgggcgacagagcgagactccgtctcaaaaaaaaaaaaaaaaaagcaaaaacaaaaacaaaaagccctctcacacacacacaaaaacctgtttctgtttccctatgtaatgaagacccctgaggttggcagcagtgttgtccaccgccaactccctgtggtcgatctggaagcttcatctagggaggggctcatgaaggggcctcatgagtaacccctctcctgaggattgttattttcaagtaccagctctggaatcagatagtctagattcaagggtggccatttctgagctgtgggcctttaccaggttaatgcagctcttaaagacttgattttctgtcataacaatgggataacagtagaataagataaaaactatttcttatatataataagggattaatcaatgatcactagtatgtactagtaggaattatggcaccatggaaattatgaaaccaagaaactctacattaaaaaacaagttttattttataaaaacagaagagaataccttatcttcctggtgaaattgtggggagcagagagatgtttgcttgtagctaataccctccattaaggatctgccaaacctcctgattatccaaacactcagcggtttttttttttttttttttttttttgctgtctgccctttggccagctgttagcacctgctgcagagggtgggaagaaaaagaaatgaggtaattgagttcttgctaatggctgtgacagaagatttagagccttcagtggttcctacagtcaagtggcagggatcctagagcacactgctgctctcagaatggatctggcttgttctggagtttttgagattgacagagctcaaagttcccaggctccagagctcaggtgctggggaggatttcccatcacttctgagatttggggagctccaaggcccctcctcttgaccctcagtggagctcaaaagaaaatcgtcttgacctcagagacagcattttggggtgaagatactccaatatacttgtttctttctttctttcttttttttttttttattatactttaagttctagggtacgtgtgcacaacttgcaggtttgttacatatgtataccagtgccatgttggtgtgctgcacccattaactcgtcatttacattaggtatatctcctaatgctatccctcccctctccccccaccccatgacaggccccggtgtgtgatgttccccttcctgtgtccaagtgttctcattgttcaattcccacccatgagtgagaacataccatgtttggtttttcgtctttgcgatagtttgctgagaatgatggtttccagcttcatccatgtgcctacaaaggacatgagctcatccttttttatggctgcatagtattccatagtgtatatgtgccacattttcttaatccagtctaccattgatggacgtttgggttggtcccaagtctttgctattgtgaatagtgctgcaataaacatacgtgtgcatgtgtctttatagcagcaagatttataatcctttgggtatatacccagtaatgagatggctgggtcaaatggtatttctagttctagatccctgaggaattgccacactgtcttccacaatggttgaactagtttacagtcccaccaacagtgtaaaagtgttcctatttctccataccttctccagcacctgttgtttcctgactttttaatgatcgccattctaactggtatgagatggtatctcattgtggttttgatttgcatttctctgatggccactgatcatgatgacttgtttctttctttctggtgttttccttggagaaagcaaaaatattgccctagagaatggcatggacagaaaagaagaagaaggaagattagaagtgaagccctgtgggcttgtctggtgagggccctcttcccaggacttagctgcatgggaagaatctgggtagcactacaaggatggaatccatggggtcttagttgcctgtcatcattttctttgccattgataattcaacacttaatcaaatgcggtggtgtttttgaaagatagcctgaagaaaaagatgaccatgactttcactaatagaatagaaaatagacaggagattgattatcacttaaaagaaaagggttcattaaacaggttccactgtggtttgcgcaattcaacccaaagtttctctgctgtaaagcaatgataagatcactctgcccactgagatcaattgagaaatcaaccaatatttaagaaggtctgagacttggcaaggtgcccagtgactgagaaaagagggttcctctttctttaagttggcagaaagacattcagctgtgatttttacgtggcctgagctaaggaagagactgagctaaggaaggcagtgtcttgtgtaggttatatccatggtgctctatgagcctgtgcacccattatccccagatatgtcaatgtgcttcacagtgtgcacatttcatggcacctgttacagttttaaaaagacagtttaattaattaatggtgaatgttcaatcttagatggtttttttaaactcaagataaaccattatagcttgagtgtttttgatgcatttggctaggagttaggaaatcttaaagaaaaattaattgctgtatcaatggaaaccccagtaggtagataacaaatttgtcattaattaaatgagaagactttttaatgattcgaggaagcgtcgtcaagattgtatgatagtttaatttgctaacatggtatgaacctgttagcttcagacacatgattaataaaagtaaaacccctcatggaatttctcagatgctcagttctagcatgcagtcatttttgagacttgctcaatgtccttatctcactttactgacagttctgcagcagccgtggcaaatgtaggttagacaaaatattacatgcaacattttctatgattcattttgctcctttttccctcttccccttcctctccagccaccctgagtcatacaacagctgtgagaacattagttacaagggagcgagctgcagacactttaggtgctgggctgtatcccattatatctggatgctgacaccaggatgggttctaaatcccttatcacaactgcctcaggcggaaaacatttttttttccttctgttgctgctgatgtaaagatgaagtttctcgagctgagagaattttatgtgatcgtattgtatgctaagcctcagaagataattctgtagctcccattcatcacaaaagcagggactttcagttgtgcttctttaagaaaaaaattccccagtagaaatcatacaatgatttagcggactaagaaaaagaagagaatcaccaacaggatgacttgtgacaattacacgaagtcatttgactgagttatttcctttattattctgtaaatgggaaaataacgaacatgctggttatcagctgtggttttgcaatggaggcgttccaccagtgcagagcggtaattacgctgcccggtctcactttgcaaatgaactgaagcctgtctcttttaattgactgtctgtctctagaattttcttgatttattgctgctcagtagaatttacttttgttttgttgatggcatttgtcaactctagtagttaccaaatggaaattgttctagagggttgctttggcataagtgtgctcatttgtgtggcttattggagcatgaaggagagatgtgcttctgtaagatgtcttgcccttctgcctgccagaggggcaggggctcacctggagtatgtttcatctggttccttagatctgtaagtgactatgaagcctttcaactggaagagtttagtcaagtgtaactgtatgatttcggaatgaatatggccccatctttgtttcccaggtggtgagtgtttagggcattatatagcagctgtgatgatgagagcttggcttctcatctccagctatgttagtctacctaggaagaaggattcttctctaagaagaattcagtgggacaatatccagagatacaaatctcaagagacagactcctgaaaacaaattgactgctcatttggcttcagattccatgcataaatctccagctctgactgttaatcacagccactagacctcacgacataggattttagaggcagataaagaaaatggcagttgatgtcttagcctgttgctatgccagtctatgatgaactagcactacctgaactcaagagtaagaaacaaatgaaactggttataaggtttaggaaaaagcaaataagctgttactgagagtggtgaccatatggtacctatagggtacacgggccctctgtgaaacccgtaatattgggctgcgtctcctctttcctctacaacctgaccccatcgcctcatttgatggattccagtcaattgtaattttgagaattgtaagactagtatactagtatgccaatgtcttgttcttttttttttttttttgagatggagtctcactctgttatccaggctggagtgcagtggtgtaatctcagctcactgcaacctctgcctcctgggttcaagcaattctcctgcctcagactcctgagtagctgggactacaggcgtgcgccaccacgcctggctaatctttgtatttttaagtagagatggggtttcaccatattggccaggctggtctcgaactcctgacctcgtgatcagcctgccttggcctcccaaagtgctgggattataggcgtgagccaccgcacccggccgccaatgtcttgttctttaaaggaagaataaatacacatttagaagatggctacaacctcatgcaaaggtctcgaagcagcaagttgagggacagggcttactggtccaagagtaacttcaggcagggaagccttttcccatgtccttcaaattgaccacatcacttggatcatgaatgctgttgatctggtttcaaaacataagaacaagcatcttcgacaatgcggttgataaacatcatcaacaacaacccaccgaagcatcagttgttttgtcttgtccgtggcagtcctgcattcagatctgtattcactgtgtgatcacatgcatttttcctaggcctataataggtttccctccgcatgcccaaacagtggagctagcatttttttaaatttacaaacaaagattgtaaaattctaattgggagtgggacatcctttttaaataaatagtcgtattaatagtaatagcaaggagaccatctagatagtactctattttcagggctcaaaagtgaaaagctagaaaagccagctgtttaagcattggcaggcaagttatgatacggagtaccctcctcacacccactccaaactaatgtgtcatctttctctgaagagctgtggctgtttttgtggttctgagttgacggggatttttttttttcttaaagaggtacatgtttatgtttgcaacatggtatttcttgcagccatactcctcaagtcaccatctccaaagctcacacactaaacagggtcaagtgagtcaaagcagcaggagagaaccatgattggggtgtctgggactagaatggggagggcagcatgtgcgggtgcggggctggccttcccgtggtctcaagagtgggaggtgtgagtctctccctggatgtttagctcagcatcacctcagagtttgagcttgactgaaaacaacaacaataacaaatatgccgaaatatgatatcatttaaaataaacccaacaacctttaaaaattaacattattccttaatcggaccattttactggtctttttttcttaagtcaggaaaataaatgcaagcctatgtgcaggtcctcaaaaaatgtgaaaataagcctagtaaaaatctggcaagagatgtggtttcatcagccacctcataagcagatcttttcacatagattttaagagagaaagttggtttatctgcactttagtggatgcttccgtttgcttaacttccgtaataagaatccctagaaaaacctggagataattagcagaagggcggaagcatgaatttaaattcttatacccacacttaattttgtcaactttatgatttgctaaccagtgctttttctgccagtttctttaagtctagcttagtattataataaaaggaatcaataataccaatctatatagtaattttcttcaagaaattcaaaatcctatggaggaatttaagaaatattttaggccgggtgtggtggctcacgcctgtaatcccagcactttgggaggctgaggctggcagatcacgaggtcaagagatcaagaccatcctggctaacatggtgaaaccccgtctccactaaaaatacaaaaaattagctgggcgtggtggcacatgcctgtagtcccagctactcgggaggctgagacaggaggattgcttgaacctgggaggcaaggttgcagtgagctgagatcgcaccactgcactccaggcctagcaacagagagagactcaatttcaaaagacaacaaaacaacaataacaacaacaacaacaacaaaaaacaaagaaatgttttaatatgagaaaacattttgcaaaagaagacatacacatggacaacaggtatatgaaaaagggctcaacttactaatcatcagagaaatgcacattaaaagcacaatgagatatcattgtaccccagtcagaatggctattatctaaaagacaaaaaataacagattttgatgaagatgtattgtagagaaaagaagacccttatacactgccggtggaaatttaaattagtacaacctctgtggaaaacagtatggggatttctcaaagaactaaaaatagaacctccatttgatccagcaatcccactactggaaatctacccaaaggaaaagaaatcaatgtatcaaaagcctgcacttgtatgtttatcacagcactatttccaacagcaaagatatggaatcagtgggtgattggataaagagaatttggcatatatacacaatgaaatacataaaatgcataaaatacaaatgcataaaaagaatgaaagaatgagatcttgtcatttgcagcaacatggatagaattggaagtcattatccgaagtgaaacaagccagacacagaacatcaaatatcgtgtgttctcactcctaagtgggtgttaaaaaatgtgttcacatggacgtagagagaggaatgatagacgatggagatttggaaaggtgagagagtgagagggggtggatgatgaaaaattacttatgggtacaatgtacataatttgggtgatgggtaccctagagccctgacttaaccactaggcaatctatgcatgtaacaaaattgcccttgtaccgcatacatttattcaaatagaaaatgaaatattttagcctatgctcattagtttacttatgaagcatctacatggctcactgcactttcttcctaagttctctgacttctgaggcaggaggtgaggccaggcagcgggcaactgtgcttccctttctcaccaggacaggtgccaggagcaagggacctaactattttggtgcaaagtgttcattaatgggtctgtgaatcccatctccagctccagcatgactccagggcctaacattaacttgagaacagtatacaggaaaagggatgtttttgaaaatgctgattatttcatagcctctgggtgtcagccgtgaatctcactttaagccccgctagggatcctgttgccaccactgagcagaaaatgcagtgcttctgtgaaggaatggggcacagaacagtcaccgctaatgtgttcctgaaaaagccggggtgacctttcttgtggctgcttcagaggatgatgtcactttgggacagaaaaaggaagatctctttccagttcacataggataataagagttctgattcttagttgcatgttgaagaacaaacaaggagcatagacactcatcctggggaaaaagactatggaatctttggaagctgagaggccagccacttactttcctgggatagagcttttataacccccgtattgggcttaactccatacctttgacgctaaagttgttcactctctggggaaaccatcaaaacaatcaaacagaaacaagagcttttaaaaatggaatatttaatacttatggcacaaataccttttagaggattgcaatgatcatggtagagagactgattcagacatttttcaaatgtttgttggaaatgtctgaaaatgacaggcagtgatagtatcaataactaaccttcatcaagatatctgtgcatcggataatctgctatatactttaaagagattatgtgctgtatgcctcccaacaacccaatgaggggtgagcgctattattaacaagaatatgtaaggcaactgggactcagagagattcagcaccttgccaaaggtccaacaggagttcctttagcaagacttaaaaaaatgattactgtggaaatttccaaacatatacaaaactagagaaattataatgagccccatgtatgcaccttataaattcaacaaatttcaatacgtggccaaactagtttcagctatcctcccacctgctttcctaccttattagttttcttttgctgctgtaacaaattgtcacaaacttcatgacttgaaacaacacaaagctattctcttctagttgtggaaaccagaaatccataatcaagtccactggataaagtcaaggtgtccacagggctggttctctctgaaggctccaggggagaatccatttgcttgcctttttcatctcctagtggccacctgcactccttggcttgtggccccttcctccatcttcaaagtgcctcactccagtctctgcttcttcattgcatcactgtctcctttgacactgattctcactcttctgcttccctcttataagaaccttgtgattacatcagatccaccagataatccaggatcatctccatctcaagatctttaatttactcacatctgcaaaatactctttggcatgtaagataaaattcataggttcccgggattagaacatggacatatctggggagccatgaatctaccacccgcaccctagcaccaacaggaatattttgaaacaaatctcagacattttatttaatccataaatatgtcagtgcatgcttcccagaagataaagacttaaaaaataactgcaataccattatcatacctaaaaacattaataagaattctttaatatcatcagctatttagtcagtgtttcagttttacctaattgtctcataattttattttaacaaatggtttattcaaattgagaaatgtttcttaggtctcttttaatctgtcagttccctttccttttcctttacttccttctttgtaatgttgagagaactagattgtttgtcctacggaatttggcaaatgtgttcctgtggtcattcacatgtggttttttttttcctgtattttccataaactggtagttaggtcttgagacttggtcatatttatggccgagaatttgattttatggccaagaatgcttcatcaatagtatgactttctattgtaccacacggggaagccaatgtctgttgtctccctcctgtgatgttaaggttggttgctgagttgaggtgttgagcactccatccttcttgtatcaaattccccatcagctttttacctacattggtgattatggcttagattcattacttcatgagggggggttacgacatagtcataatctaattctgtcattcagttttcatttttagccagaattcttatataaaaaaataaactttcctctatttgattatcttgaggtacaatttatgaaagaaagacaggagaaatgtctaattctttctcctaatgcatccatttgcagaatagtaactggttttctagcatcctacaaggatgaaaaagtgtttgtgtatgaatgtatgtgcattagtaggaagtcacggtttcgtatattcgtgatatttcagttctttgcagaagttattctttttcaaattgccccatctttagccaatgagagccccttcagattggctacagactcttttgacattaacctagaaacttcattgttttctgatgtaacaaaatgttttagactcatcttgtatatttactgtcccaaatatcaaatcagtgtttactccaaaaaagcccgtgtttcttttagtaggaaacggtatttagagaccatactctaaatcctgtagatcaggggtctccaacccccgggccatggaccagtaccagtccgcggcctgttgagaaccgggctgcacagcaggaggtgaacagcaggtgagtaagcgaagctttttctgtatttgcagccaatccccattgctcatattactgcctgagctccgcctcctgtcagatcagtggtggcattatattctcctaggagcctgaaccctattgtaactgcacatgccggtgatccaggttgtttgctccttatgagaatctaatgcctgacgatctgtcactgtctcccatcacccccagatgggaccatctagttgcaggaaaacaagttcagggctcccactgattctacattatggtgagttgtataattgttttattaaatattataatataatagaaataaaatgcacaataaatgtaatgcgtttgaatcaccccgaaaccatccctaacccccttgatctgtggaaaaataatcttttatgaaaccagtccccagtgccaaaaaggttggggaccactgctgtagatgctcagagctacttggccttatcattagtcgaatctagaaaattgtgtaccaaaagaactgatatcaccggtttatactgttattttcaactcaaagttaatattacatggttttacttaatttatgttatattatatttgtatttattttctcttatgctgaaaattttggttccaaatatcctcagtataatgacatatatatatatataaaagcatatgtatgtacatatttctctctatatatgaaataatatatcctctctatatgtaatagtatactgatatatatataaaatatactaatgcaaatacacatgtaatagtatattaggagtataatatatagatacatatagttttataagaataatagtgatgttattaatactataaaaacaacttaagatttaactacagtttcttttgttcttaagataaattctactagagatgtacagttaaatcgcagagttttaaaaccactgtaattaattccccttagtgtaattaaaccaccaactcgatgcatagttagctcaatgcaccaataagcttatgggcttattagttttattttgctttctacttagtgattgctatttttaagcatatgtaacactaaccttatggttcaaagtcaagtgtataaaacaagatgcattcagagaagtatgactcttattctgtctccaacctgacttttattctctcttctaccttccatctatagagaaccattttaattcaatttttatccttctactgctttttaataatttagccatagatattcataatccccggttaggcaaaaggtgtgggactaaacacactgttctgcatctggcgccacaacttttgaaagtaaaactccctaggcttgggaaatagaccattatttactttcttactgtagacctatcagtcgttctatcagaaaagggtcagtcctgcaaaaatgggaaaccagaatcctctttagattttagatttttcaggggtgtgtttgtgactcacactgtgatgatattaatgttttactcattataattccagtataccaccccaaaatcccccaaaacaaacaacagtcataattaattgtatgcactgattttggacatactgctttattttcagccagatggtttgccaaaaaaatatttttctatgttactatgtgataattataaacatggttttaatagtaattgatgttccagtaagtgcacatactataacttgcttaccatatttcattgaagggcatttggttggtttctaactttttgttatatgatagtttaaaacactaatttctctttgctcaagagccctgaagctttgaactgatggggactgacaccatttagctaaaagatatcttgttcttactttcctggggtcctttttttgaggggtggaagtgtgaggaaacatggagatcttctcaacccaaagaaagccttttactcaacaatttcaagagaagaaaaatatgcaaagtacaaaagatgaagatagaagggaaaatcgccttttatattaggttaaatttttgagatagggtcttgctctgtcacccaggtgggagtgcagtggcacgatcacagctcactgcagcctcaacctcctgggctcgattaattatcttaccttagcctccaagtctaggtccacaagcacacaccaccatgtctggctaattttaaaattttttgtagagatggggtcttgcaatgttgttgagactggccttgaactcctgagctaaagtgatccttctgcctaggcctcccaaagtgttgggattacaggtatgagccactgtgcctggcctgaggctgtttaaaagaacaaaaatctttataaaaagtttcattgctgtttcttttctaaaataagttgtctataccagtggcatgcaaaatgtatcatatcagatttaatatgtgaataatgagggaaactgtgactttggacagaagactgtcgtagactgctctagtagaacagaatcttagctaatcaccatgcagatcccctgggttttagagttcatactgatcctcaactgggggctaacaatggtttctcatttatcattttcccctgcttgttcagcattctacttgaagccacagagaatgatggagcttacatatttcctttgataagatgaagaaatgaaaacatacattaatgaaaaataattccagaggttttttggactataggagttaagaggagctgaccagtgagcctgtggttgtccatgaaggttctgtggggtagagtttgaactgtccctatccagaatagtaggagggacagagatgcttatgagtgaaggccgcagaacaaggatggcatgacttgttcatggggctggggagaaccagtctgaccagacagaaagggttattgtggtttgacggtcggtgaaggttgttaggtggcctttggccacataagagagtgttagaaggtagacagattattttaagtgtgatgaaacaagtagcagttggtatgtagagaagtggggagaggtttgatgaaaagcagtgtgttagaaagacggttggcaacactattaagagtagattaaaaaggaaaaggaatgtgaaattagagagaccagaaaggaacctattatgataataaagtcatgattccatggaaagctgaccagaatgatgatactattagagaagagagaggagaagtaaggccaattttttctttaattaatgagtcttagtgactgaatgtgggaaataacagagtagtgattccaggattttaagcgtcggtgattgtgagaatgggcaatgcaaagtattgattaaatcagcagcattagggttgggaactagattagaatgggagggggatgatatagtgaattcctccctccctccctctctgccttcctccttacctttctccttccctctttcttttcttccttcccttcctctcttccttccttctcccctttatttcttcttatctttacatcattatttacttttacatttagcaactattctattccctggagctctggtaccaataaacaaaagaaacaccatcttcgctctcttgaagcttacatttcattaagcagagtggcagataaaagaacaagataactcagatagtcatggtgctacaaagaaaataaaataggcttatgtgctagctggtgattgaggctgcagggactggacagtactactttagactggagcttctggaaagcgacttaggggaaacactcaggtgtcagccatgtgaagatctggtgacatttcaggtcattgcaggcagaaaaaaacaaatacgcaaagataagaacagccttggagcgtgtgaagaacaaaatgaaagctgagggcatgggagggtacatcgtaagagcaaggaggtgaggccaaagtgtgtttcagtcaaggacagatcaggacacagaaaccacctagtaatttaaacagggatggtctaatacaaataattattaattttaacagagaactggagtcatgagggattcaccagtaggaagtaaagacaagtctaaaaaatgtaagagcagcagatatatgaagcagctaccacccataggactgagatacagggtttcctgcccccaagataagaccagacctggttagagacagcatgaccatggcaaactggatagccaagaagtcagtgtcatgctgcagcagtgtaacctgctggaagtgccttctggaagaactttctgaaagttcttcatcaccctccatgatgccaaggaaagctgttcatagggagttgtttcaccagtggcaatctgctacgaaaagggcttctgggaaatgctggcatccagatgctggggaagctgcccagacagtagaagctgaattctggggaagctgtatgcttgcaggagtcagggggtgcagaagctgagtgctggagaagccactgtatcacaggagctgggtgcagaggaaacaacgcgtgcttcagaggctgggtgctagaggcctgtgcatgttgtaggagcagggtctagagaagccatctgcgtttcaggagctggctgagaacacactgatatgggcccgggggtggggtgggggtgggggtggggggaggtagaggagtggcagggagggaggtagtgggtggggcagtaggggagagggggttggggggttggggggaagggttgggggttggggggagggggtggaggtggggtgggaccctttcctcctgcaaggcctttctagctccctctactgacaaaacttaatactgtgtcagctagcaaagaaaatacctaaagggatcagctaaatttttgctgagcagtcaatgtacatttggagctgagaggcaataaactggcatagagaagtagcaatggctctgatctctgagggcctcgcagtcgtgttgatgattgtattcatttagatgctggttgtggttagtgcttgacattttaactaattttttcttccaattccaatgaaatagataattttattattcccactttacagacaagaaaactgaggctgagggaggttaaatcgcttgtccacaatcacatgctagtgcggcatggggccaggattcaaacatgagcagtcagtctaactccaaatctgcccccagactccataaagtcattactgatctttgaacagacagataaatgtatcaggaaagataaatacttaaaataactttgcagtcagtccttctgtaattaaatcagccacctctattttacagattttatgaatttagaaattttagttacttttaaagtaaagtacaagtttaccaggaagtacaaattaaaataaaacgtggagaatacaacacctttcaaaggaaagtagagaaattggatgattgaggtaattagaaaataatattttgagtatagtttgatggatttcaggcttcttcagcttgacaaaaacagaaaagagggggaaagttcaaaaatattattatggatttgaagagatgtcactcagaagatcttgataaaatgttcctcatccctagtggatggggggcgtgggtggcagggtacaaaacgaaacatggaaccagtgatgggcttttaggaaattctatatggagcttttaccatgcaccagacctcaggctggggaccaggggtacaaggatgagtaaggcatctggccttcccttaaggagcttgttgtctcatggctgggacatgataaggacattactacagacatacatgaagagctaaaggaataatatatggaggaagaactagttctgcccaagggggaagtcaagggaaggtaccaagaaagtatagcatttgagttggatgaagaactggccaagacagctgaggaaagggagatgtagattaggggccgacacaagtaaggggttggcaaggacatgaactgaacggggtttgaggaaaaagcttagcacggggtcaagaacgtagattttggggttagagtacctaattctggcctcctcaatattttctagtttcatgatcttggtcaaattatttaatctctctaaatttcaatttctctgtctatacaagaaaataaagtaggccggccatggtggctcacgcttgtaatcccagcactttgggaggccaaggtgggtgggtcacctgaggtcagaagttcgagaccagcctggccaacatggtgaaaccccatctctactaaaaatacaaaaaaaatattagccaggcatggtggtgcatgcctgtaatcccagctacttgggaggctgaggtaggagaattgcttgaacctggaaggcggaggttgtagtgagctgagattgtgccattgcactccaacctgggcaacaagagtgaaactccatccccccacccaccaaaaaaaaaaaaaaaaaaagaaagaaaataaagtagtacccccttcagtgtgttattatgcagactgaatggtatgaaaagcatgttttcaccattactggcacatgctcagttaacgttttcctgccattcgtagcagcaggatgaggagtattgaaaaggctaaagattagagttctgggaagaataataaggattagatgtcagaaagtgtgtcatgacatatttgtgtgtatgcgtgtgggtacacagaattttgaaatagttttcaattgaagcctttgtttgtaaccagtagcacagggagatgttcagttttgcacataataatgaatatctgttatgtctgttagccatttgtaactactattgttgtttctgtcatctccagtaaagtgtttctgtattttcacaaaaatgagcaagacctaccacaaaaaattatcaggtaagggtgactttatgggtcccctgctgtgtatttgacaccaaaatgactcatcacatgagttcctaagtgctatgtttggtttcagtgtagaataggagattgtgtttcccaggtagaaaaggagactttgaaatctttctcataaaatgcgtgaaaatctggtgccatcagatcatgagtcttgtcatcaggatgggactcactcttggatccatcaaccagctagctaggtaactctgagcaaataccagatgctcttcagcctgtgtcctgatctgtaaagttgagatcataatagtaatacttcacagtgaaattgtacactagaatgaaagaatgcataaaaagtgcctcgtaccctgccacgcacagagagggtgatacacatcggtcccctcatccagcatcttctaattcacccctccctgtccccagcttctcctgtctggggatctcaagttgggaatggtcatctttggatgaagctgccatgtttatgtggacttagaggcagatattctattgggaattcaatggatgcataaggcagtgtaggggaactgatttttagggagcaatatgaagtcagagaaattgcactcttatctctacttacgttcctcatggtcccttttattcttttatgacaaatgttacttcaagctacagtagtgttttcaccaggggctgaaggaattgatggagttgttttctttagaatgagccgtaacatccctttgttcacagagattgtaaatcctgcatctttcagattagatcatgtatgttcaatatcagtaggaaacaaacagagaagtaaatatttgctacaaaatgtctttctgctgccttgaaaatgagtttcctaaatctgacatgtcagttaccctgcttcatctgtttcacatttagagtcaaaggaaaacaatcccccacagcaaggagcctgtcacttcacttggtgtatccagtgaagataatgtgaccacagtgcagtgggattgaatactgataaggatgtggcgggccatgcttaaagtttggtgtctcattcaaatgactggctgagagatgaaaagaaaacaaaaattaatccccctcctggaaccttatactgattcacttagtggttggttgctgctctaaggtctgtctccttttccccccattaataatcataatcaaatagccattattggtttttggcaacagggtaattactttctcgtccttattttctgggacagtcggtctgttcatgagaaagggcggttgtgcaatcgttctccctacgtcaactctgagaagtcggttgtgccctgcagatattgatgtcagcctgtttgctctctggtggagtgaaagaagaaaataattttattgtgctatttttagacttcaatttagattgcagcctttatgatactttgtgtactggggatagaactgttgatgcagaattcagctgtgagatgctctaggttctacctgcccctgaaagatttttttcgcttagcctgaatgccttagaactattcagtcacattgccttcatcgtcagctgaaagctgagccatgacaatagggttaagatgcactttgtattgacagtgtttgccgatggaacttgctgccagcagtctccaagtctgcaatttgcctgtaaaggcctaatctgatcttttatatgcataaataatcagcaccatacaaattctctatgaacaaaatgagtttattgaccattcttgcttttctaaatagttttccagaggtgatagatgaaagccagacaagaaaaaaatatttctttgctggatttccttctgaacaaacaagaaggacccaggtacctgggactccaggtatctttttctcagctgggatggaaggccatggactaaagcagtcttcctagttctttggtattagcaatgagctggtcttaaacttcaaagggatctaagaaagtgccagtaatacctgtctgagcttgttttgtgacgtgtatgttaccacatgtattaaaattcagatcaatttgcatctaaattatatgagtgcatgtgacttggcaatccagaagctgtcaattttagtttataagaacctcaacttgggcctggtatggtggcttacacctgtaatcccagcactttaggaggctggagcaggtggatttgaggtcaggagttcaagagcagcctgaccaatatggtgaaaccccgtccctactaaaaataccaaaattagccgggtgtggtgacgtgtgcctgtagtcccagctactcaggaggctgaggcaagagaatcacttgaacctgggaggcagaggttacagcgagccgagatcgcgccactgcactccagcctgggcgacagagtgagaccctgtctcaaataaaaaagaaccgcaacttggtccttgctactccaagtgtggactgcagaccgacaacattgacatcacatgggtgtatttaaaaatgcagaatctcaggcacttccccaacctacaaatcagcacctgccttttaataatattccccaagtgattcataggcacgttaattattttttaagtcacaaatctttttaaaaatctactatgatctgaatgtttatgtctccctcaaattcatatatttggacctaatccccagtgcaatgatgttaagaagtggcacctttggtggtgattaggtcacgagggtggagccctcacgagtgctgattagcgcctgtataaaagagggcccagggggctcccatattcctttcaccgtgttaggatacagcaagaaggcaccacctgcaagaaattgggaacttaccagacatcaaatttgctgtccccttgatcttggactccccacccttcagaactgtgagaaataaatttcttttgtttataagccacccagtttatggcatttttattatagcaactggaacagactaagacagaatcccataaaatctgtggaacctcttcccataaaaatgtacctacacacacaatttgtatataatttcaatggtgcaagttccgtggacttcaatgacacttccattcattggaagcagagagcatgcctgagggagcccccaagtgccatgtgccccgaacaatgctgacccatactgctccttgattgtcacattgaccaggtcttcaccttcatgcccagaccttgtctatgtaagcagcaccagcctctggggtgtcccatgtcagcctcagcagtccctttcatccatgtggctctcattaaccagtccttgctatcattttccttgcctggctactctggtcttttgctttctccttccccagtttagggactggtgggtacaaacattttagaatgaccatgaagtaatatcagttagctgaaacatatctatcaagattctttcctacccaggtcaggctcataaacagatgagatggagaaaataggtcttcctgctgtttcagctgacggtccacccatgctgcaggtcctgctggaagttcacttctgtgttctggtctgtgctttgatttcttctaatctttggtgatggcataaagataacgcaatgcaggctaaagaaaaccctttaagaaatctgttcacttactggcggatttgcttatcataggcatgccctgaccttgaagagtccttgctctggtagggaagcgcatgtacatggatgattaaaataaatgcttcatgtcaaaatacaggtacagaatgctattttgctacgaaggaaagaataactagcttttccaagaggagtgagggagagcatcaaagagagctggcttttaagggataaagcagacattgcctgagataagagctatagaattgcttattgtgagaaactacagagttgggaagatcgagatgagacaggcatatgagcagaagtgagagacctggcaggaataagagctagcacttagaccctgcttgctgtagggcgtgcacaggtctaagtgctttatatcaagtacctgtgcagttctctccacagtccaacaatccttccattatggatgaggaaacacatgcgcaccgagttcagtatcttacctaacgctgtgcgactgcaagcggtggagctgggctttgaacctatgcagtctggcttctacactacacttccaggcagagggcatctccctgtgcttctgggataaaacttgcagcactgccttgtctaggactcaagaggcactgttttctcctcccctactggttctgcagtctttccaactctttccacttcatcaatgagccatgtccatcctcacatcactatgtgtctgtgtaatacttagggccactgagttatggggaaaaagagaaatggatatttcttagtattgtctggtggttctgttatctcacagttcatggaaaccagatcactacaggcacaaggcattaccatcagtctcagagaaggcctgacaccctgttatagatcagagagtcctggccaccactaaaggtcttggaaagacacggggaaggcaagcagaagcacaggtggcctgaagacatctccttccggccaagagtccccctgctcatcccccaccccacccaggcaccaccctccacagctaaaggtgtttatgctgtaggaaccctgtggtggtaggagatcgggggtgatagggctgcttggataggaaacatatgtgattgttggcactgctcttcatactgttgtcaaattcctcactgcttctgtgtacttggggtgacagtctgacagcctgtgaggtcagacaaagcccagattacttccctctcgcctttccgtctcgcacttgtgggctgccattcttaaaggagtcacgtgtgggctttctttgccagaagtaggcatggcttacatcttttgggtttgggcactggaaatgactctgcttcccctgcagacacaccctgatgaggctgcaggccactagctctgctcctttttcaacatcagaaacagaggctgaccattgctgggacatttcccttctcctgctcctaactttgtcatagacgtctcctgaactgcagttactgtgtttggaggtaacatcatccccttctttggtttgtgggtagggaataccagatacgagggagagcatccctaaggccttcacctgacaccagtcctgcctgtatgtcctgcagttctcatggtaagccatcagcctcgccaggcggcacctgtgtgccaagcagcatggcttattcattgtcttctctagaacacagaatagtttggggacatttctatgttttctttctccaacagccagatatatgtgtccacttagctgcacataattattgtctctctaactctttgacctacacatttgtcagataaaatattttgggtgagagcttgttagcagatctatttccattccactcttggcatttattagcgagccctcttcgggaagccgtatgttctgagaagtaggaagaataacgcattttacctatagtgcaatgtctggccagcgcctattctttctgggttgagctgctggaatgtattcaggggataagctgagaggcaatttacgaggagtgctctctccttgtcttgctcctgcttccctttaaaattccttggctgcccttagtgtggcatgtgtttccatttatcctatagttctcaagactcaatggagctcttgtacttctgaagggcacttactaggaagcccttctccctgacgttgagcttgcactgatcaaaacggggggccccacaaaccatcacagggatatctatgcaaagagggaatgtttagcaccaaagttaaggactgtgcatgctttggcagaattacaaaaggaaaaataagtggacaaagtatgttactttttttttattattatagggtgtgtgtggtttatttgaacatcaacaaaaacacaacagaaaggggtaaaatgtaaaggaaaagcccctttgctgtcctccaaccctgaggaagctgttagcagttttaagtgcatccttccagaaatatctccctcatgtatggacatatatgtcctttagttagttttagaaaattcaaatggaatcataacagaattttgttctgtgccttgccgtttttgcttaatttttcttggaggtctttcaactttaagaggtaaaaatggctgtatgatatgtaacaataagtgtggctgattccaattttctccatttggttgtttccagttatttctcatgctgcaatgatcatccttttttatatgtctcttttaccttgtctgaatattcctgtagagtaaatgcctagaagaggaatagctagtgaaaaggacatgtgcattttaaattttgaccaatattgctgaattactttcctaaaaaaggcagctgacgtatccctcacctttaaaacagcaaactatacaactctcagacctttgtctccgaatctgtgcatctttatattggatgcaaatcacgtgttgattggctggttttttttcttcctctgccttttttgcttattttcttttgggatatttgcttttttacttcttgactttcaaaactctttgctggttaataaatctaactcatagaccatgcaacgtgttagaaatatttttttctaatatgtcatttgtattttgactttcatttatggcacgtttgccacataagagtttaaattgatatgggtctaaatttttcactgtttttcacttttggatttcaggtttgtgtttgcttagaaagtttttccccacttcgagtcagtcaaataatgtaaaaattttcatttagctattgggcagcttagaagccaatactagactggccaaatagagtggcatgttgagacttaccctgagattttagtttttaatgcagcgaatccattgggatcacttataaaaaaggattttaccctattaatctttactagaatggatatttttaaacttaatttttttgtgcttctcattgtaggagtcctttgaatgtagcttccctgagtgttcattcagttcattagttattgagttcttatagtggatgacatcttgctagtctataggcttcatagggttttaaaaaatgaatacgaaatattcccaaacctgattaattacatacagtagaagagggcgtctgtagacaaaacccagagatcaaggcagaatgtaacaactctcttgagagtactacaaaatgccatgtggttcagagaaaggacatcacatatggttgtgaggtcagggaagaattttatattaaagtgacatgagccttgagatgggccttgatgaaatggttggatttcaatgggtgtggattttagagaaagggcataagaagtatgcatctgtaattagaaacctgtgcatttgttctgggaagagtgagaggtccactttgcaggtgtgtggagaactcacaggggtgcaatgaatgagtccagagtagggctgagggcatcttgggaaaggcctctgagaattttactctccatttgaaaaggaataagaggcattcacgtttttggagcaatactagatgggatagattggaagtatgaaatatttgaaggcagaaaggcccatcactaattgtagttttcctggagtaaagaaataaaatgcttaatgtggagtagtactggaaatggggaaaagcagacctgaacaatattctcagtttataatctgtaagagggtactggggctgaggaaaataacaagtttaaaaatgaccaagatttctagccttcatttggttcactctcttaacatgcattgagttcttgctttatgtcagcactgctctgggcgcttggactagaggagttgaggagttggcacgagacaggatccctgctctcaaggggccacagaaaacaaacaggccaggatgatggcaggtataaggaaaccatgaaaaaaaatggagaaattaagaagaagggcttgtttgatggggagccctgataactttgattctgtgtcttaaaacttcaattcatgcttcatataattatcaatttaattattgctggtggtgttctctttctctcttcaccctggtatactacggagtgatacaggaaaataaattgttattcgaattttaaataggctgcaaagttggaaagcactttaaaatctgaggctggttggcttatccacaacaggaaagggaagtatgttacactaatgatgagaatagatctttgatttctgattatatcttagtttcttcacctgtgaaatagagacctgtcctaaaacagtccttgtactttgctcacagtttggtgagtcataaatttgggaaggtcttgcctgggcatttctctgcacgggcctgcaccagggctgaacgtgcacaatggctcactggtgtggctggcaatggcaacagctgtcagctgggatcccagagggggccactgaccaggcatgtagtccctccagcatgacagtcttgggctagatagactccttgcatgacagctggcttgtctcagagcaagtgtcccagaagaaccaggtggaagctacagggcctttccctaccttgccttggaagttagatggcattactccctctctgttctattgattactccaaggaaggcaccaaggtcagcccagattcaagagaggaggatatagataccagctctttattataggaatgtcaaaagagtaaaggttatgtttttaaaacactacaatgtagcaataccatcttacctcatgaggttgtcttgaagactaaatgaagtaatatatgtacaacccttagaacagcacctgaccaaaaattattaacaatggtgatgatggtggtgctgggagtggggatggggatgaggatgatgaggatgatgatgagtagctgcactgcctttctgcaaaatgtcccttgttgtctggcaggttgagttttggaaagaatggttttacctaatttatatttcctataactatgaaggggattgtcatcggttaattgccttaatctcatcaccttctaactaacaatccagggaggggttgctatccattgtgttctaagggagacctgaatataaactaaattctattaggaagggcaagacaagaaagagagggtagtttcaaccaacaatgacctctacatgttcctcgttaaatactctttcttatattacatttcttcctttcatattatgaaatggcattggagaagaagactaaaatttccaaaagttcagtggaaaatagtattactttttctttcttagaaaatagaagacaaaggaataaaatttaaacatgtctaataacaacattttttttttctgaattggaggttaagttgcccagggaaaaacatgcctacagacacatgaggactattctaccttcatcagtttgcagtggaaaatttagtactattggccattcacatatcagatattttacaccatcatataaaaagacctggttattttctttttttctttttttatttattttattttattattattatactttaagttttaggatacatgtgcacaatgtgcaggttagttacatatgtatacatgtgccatgctggtgtgctgcacccattaactcgtcatttagcattaggtatatctcctaatgctatccctcccccctatccccaccccacaacagtccccagagtgtgatgttccccttcctgtgtccatgtgttctcattgttcaattcccacctatgagtgagaacatgcggtgtttggttttttgtccttgcaatagtttactgagaatggtgatttccaatttcatccatgtccctacaaaggacatgaactcatcattttttatggctgcatagtattccatggtgtatatgtgccacattttcttaatccagtctatcattgttggacatttgggttggttccaagtctttgctattgtgaatagtgccgcaataaacatacgtgtgcatgtgtctttatagcagcatgatttatagtcctttgggtatatacccagtaatgggatggctgggtcaaatggtatttccagttctagatccctgaggaatcgccacactgacttccacaatggttgaactagtttacagtcccaccaacagtgtaaaagtgttcctatttctccacatcctctccagtacctgtttttccctgactttttaatgattgccattctaactggtgtgagatggtatctcatcgtggttttgatttgcatttctctgatggccagtgatgatgagcgttttttcatgtgtcttttggctgcataaatgtcttcttttgagaagtgtctgttcatatccttcgtccactttttgatggggttgtttgtttttttcttgtaaatttgtttgtgttcattgtagattctggatattagccatttgtcagatgagtaggttgcgaaaattttctcccattttgtaggttgcctgttcactctgatggtagcttcttttgctgtgcagaagctctttagtttaattagatcccatttgtcaattttgtcttttgttgccattgcttttggtgttttggacatgaagtccttgcccatgcctgtgtcctgaatggtaatgcctaggttctcttctagggtttttttggttttaaggacctggttattttcaaagcttccaagaaatggagtaaaatactaatgccctttaagtgaacatattaataaatcaggaaagagagtttggttataagagctgaaactctaggcatctgtgtcagaactcagtatttactctcctaaaatggatagaaacctacaaactcactgcctaccctctcccagagcaccattccccatagaaaaccccatagaaaaacactaacatgcctgggtctcaggaggattcaagccacactcagatgatctcctagaccccattttacttccaactggcaggaatcacaggaatggtgaatatcaattctgttctcaagaacttacccccaaacactgaaattgtatctgctagctgcctcattactggttgtgaaaacatcaccaaagatcttgcacagttcaagtagctgtgagtccttctcttcaataattattactaatgatctaattgttttccctgggcagaaatagcaaagcttctgaagacttcaaaatcaaccactactctctttagcacaaacagatcaataagcaggtatcttaaaaatccaaagcttgatgaaattattatgtattatgaaattacactgtaattttaccactacatattttcctcagcactcagcatagcatcccctcaaactggcttccaaactttgacgtgtgcattctaagagaagtttggggactaccctcactcagggtgcacatactctgtcccatcaaatagcaaatagacacaaagttacagtattccagtcattatactgcagaaaattatttacagaagcagcaaacctttcttaggaaagttataagctaggctgctggctctttcctttgaatccagcctcgctcacaccgtagaagccagagcaatgttgatggatctgtcaagttcataataaaaaataacagagaactcctcaggtaactgaaggtgatttggcccacgtgtggggagaaaacagatgacagcgtggagggggcttttcagacatgaccttttcttcctccttcacattgctgaggaaggccaatcctacctaggtgcttcaagaaacaaacccctgctggcagtgaggctcggggttttgaggctagacaagcagtagcagaggagcactgcctgggagggggtcaagcagatggccaggatttcagcatctccatcctccctgttccccaaggggtaggtaattacaattgagggagactatatttctgggagcacagatgattcccccagaggctcttttccctgcaccctcctaccacctgaacccactgggacctgcacaagtgagggccttggcagtatccacttctccaaagacccaagaccagcctaagtagtaaatatgcctaaggaaataagaactcatttggaaaataaacaagactgctttggaggacaactgttaaaaaagaacggtaataaatggaatggctaaaacctgatgaagcatggttattgaagtagacatacaaggtgttcaacacacatatcaaatattccccaaagataaggaaggatgttggaaacatgacataaaacatgaagccctaaaaaggagtcaaatggaaaatcaaagaatgcaaagtttaattattttaagtttcagtaaatgcattgaatgccaagtggattcagctgaaaagccaattggcgagccagaagatctcagaaattctcagaggacaccagcaatagtcagagagagggaaaacttaaaagataaatgaaacaatatgaagaatagcaatatgaagatcaacattcatataaaaagaatcccagaaggaaggaaaacaatcaatagaaaaatggaaggaaacatatgagagaaagattgagaaccgcccagaaaaaggaaaaggtataaaacttccgaccaatgggcttagtagagtgcaaaacaggatagaaaaaaaggtgatgggcatacctcaataggttgtaataacatttatgtaaaacaatgatagagagaacattctaagagcaggtcaattattaaaggatgagaactagatcgacctcagacttctcaatagaacacataatacaagaggctatcaagtaatattttcaaaatgtggaaccaagaatattaaataaaaccattatttaaatgggactatgagacctggaaatacttaaaagatttatcatgcacaagcttcttgggaatattcttagaggaagtatttcaagaagatgaaaagtctaggaggacagtatgagtggtgtcacagagtatgcaaataaagcttagcaaattttttactgttgatgacatacagaacttacaaatagaacaaacaacaaaaatatattttaataaaaatctggaactaaaatatagcctcaaaatatatatatcaatttattgcttcagcggtgggatggggtagaatgagagtgaggtgaaaatacattaaagcacttttcttcttgtttgcgaggaagatgtagaaattgaaaagctcagcaaatttatatggaaaaacataaatatgatcttacagatacaaaggaaactaccagaagacaaaaatataatgtataatttttagaccaatagaagaagatttgatccacccaatggaaagtaggaaaagagaaaaaaaataaaatgtttaaaaagtaagggaggattcctggtctgggaaaaaaggcatggaccatttctctctgcttcttcccactaaatgcaattctaaatcctgaaaataatgcaagagctaatcaaatgagaactctgaaagaccgtgagaggacagaaatctgccttgggactgcaggactagagagaaaacatagcttcagggcttcctacatacctacttcatgaaaaaagatgacctagacctggatttcctgacctccaaccaagcaaccaaaggcagctcagctaggtttattcctgccctggatttggagccctgctaacaataagcagccaggggagagctctccttccctcctggcctccaactcccttcccctcccagagacacctggttagccaggagcccctggcaagagggaccctgccacaacagatgcccagcctgggaagtgttctcctctcccctccctgccccaccaggggcaaggggaattctgccacagtaggtacccagccagggaagtcttcttgtcctccagagtctgagactttacacccgcaccaagagacattcagttacctgacctggggggaggccccttctgccttctgccccttcagctagcaccatcagggaccagtggaagttctcctagagccagatgaatcaagcagaaaaacaacaacaacaacaacaacaacaacaacaacaaaacaaccaactccaaaacaaaactcgaaggcaaacaaatgaaaggaaccacactgcaatggcttcaaaaataaaaattccattggaaccacatatagaaaagtaggacgggacctgcatgataaagctaaacagaattccctcataaaataaaaaaattaaatggaactcaacgttttttaacataatgacccacatgcccaagatataattaggaaccattcatcataacaaaaaccaaggatatcacagcttggatgaggaaagagaatcaaccgataccagcggggagatgaatcagatgttggaattatgtgacaagaattgtgtatggtcatcatgaaaatgcttcattaaactattacaacaaatgaaaaaattagaaaaggtcagcaaagatatagaaatttttttaaaaaccaaatgtaaattatagaactaaaaatacaaaaacagaaataaaaatctcactgcataggctcaattgtagagtgaaggtgatggagaatagattcagtgaaattgagaacagattaatagaatttacccaatctgaacaagaaacaatggactgaaaaaaatgaacagagcctctgggctctgtgggacatagcaaaagatccaccatttatatcactggattctaaaaggagaaaaggagagtgaggctaaagaatatttgaagaaacaatggctaaaagctccccaaatttggtgaaagccataatcctacagattcaagaagctacacaaatccccaggagaataaataaaaataaatccacactaagacacataagaattgaatttctgaaaactaaagacaaggaaaaatccttgagaacacccagagagatttactacctatagggaaacaaaatttcaataacagtgaatttatcatctgaaactatggaagccagaaagaagtggcacaattatcaaatgataatagaaaagaactgtcaacctacaatcctacatccagcaaaattatcctttaagaatgaaaaggaaataaatatattcccagatgaagaaaactaccgtgtatttgttgttagcagattaaagattagctagatgaaattctctgggaggtacagaaaggaatatagaataaaaagagtagaaacacagtagaatatcctttacctcatgtgttttatgtattgtattatggtgattgagacaaaaattttaatgtcatctgatacttaagacaatagtattttattttattttatttttgagatagagtctcactctcacccaggctggagtgcagtggcgtgatcttggttcaccgcaacctccaattcccaggttcaagtgattcccctgtctcagcctcctgagtagctggaactacaagcatgtgccactgtgtccagctaatttttgcatttttagtagagatggggtttcaccatattggtcaggctggtctccaactcctgacctcaggtgatccacctgcctcaccctcccaaagtgctgggattacacacgtgagccaccacaccaggcaataatattttaaagtgcagaaggtagagattgaaatggaagggaggtttatttgcatacttaaagtagtaaaatattggtgccagttgatggtgatgccaccagcatattgtaatacacagagcaattattatgcaaaatatacaaagagatataatccaacatattataaataaattgagatgaaaccctaaaaataggtccataaaaatatgctcaaatgatttttggcgaaggtataaaagtaattcagtgaaggaacaatagaatttttaacaaatggagctggagctattgaacattcatagggaaaaagatgaactcaaactaagtctcatacttcatgcaaaaattaacttaaaatggatcaaggacctaattgtaaaatataaaactataaaacttttaggaaaaaaaaaggagtcagtctttgagacctaaggcaaggcaaagatttccaagactcgacattagaagcacaatcaagtaaaaggaaacattgataaactgaacctctttgaagtaaaaccttttgctctgtaaagattcatgtgaagaagatgaaaagacaaactagtgactgggagacatgtttgtaaccatatatatctgacaaagtattagtatgtacaatgtacaaagtctcaaaacccaacactaaaaaatattgagtagaaaagaagcaaaagacataaaatacacctcactgaagaggctatatggatggcaaagaagcacgtgaaaagatagtcaacatcattagaaatgagggtaatggaaattgaagctgcaatgagataacattacacacctctcagaatggcaaaaacaaaaaaaaattataacaccaaatattggtgaggatgcagagaaacaagatcactcatgcatttttgataagaatgcaaatggttggccactctgaaaaacagtttggcagtttcttataaaactaaacatgtaactatgatacaacccagcaattgtgctgttggacaatcatttcagaaaaatgaaaatttaatttcacacaaacacctatgcacagatgttcatagcatcttttattcataatatccccacactaggagtatccgagatgtctttctgtgggtgaatggttaaacacactgtggtacatacctagcatggaatactactcagcagttgaaaaggaataaacaattgatacacgaatctccagggaattatgctgagcacacacacacacacacacacacacacacacacacacacacacaaaagccaatcccttaaggtatctactttatgattctgtttatacaacgtttttgaaatgacaacattttaaaaagtagtaacagacttagtggtctccagggactagagagggggaggcatgggacgtaggcaggtgtggttataaaagagaacatggagattcatgtgataattgaattgttctgtatcttgaatgtggtaaggggtacctgaacttacataagtgataaaatcacataaaactatgaaaacacacacacaaggggaactctgacgaagatcagtggattttatcaatgtcaatactctggcatgatattgcactactgttttgcaaagtgttaccattatgaagaactgggtaaaggtacatgagatctctctatactctttcttacaattgtatgtgaatttaataaaaagaaaaagaaaaatagaaaaaaagaagggaatttttttaattgaaagacttggctaaaatcaatgagaaaacaccaataattacacagtaatgagagtacatgggttaaaaccagcaatccaaagataaaatcttagaatgggttttatacaattcagcaaatgttttatgttggagtcattttaaaaatatgcaaataaactgaaaacatagaatggtaaaaagataagctgggtaaatttgaattaaaagagtgttggaataacaattttagtatcagacaatttaggctttaaggctaaaatatcatcaacaatgaaaattgtcacatacagaaaagaagcagttagaaaatttaatgattggaacccctaggtatctaacatcataatctgagactcataaaacaaccaataaaactatgggaggaaatagaagaatcaagaattatagttggaaatttaaaacactcatttcagaaactcatagatgaagcaaacaacaagaaaaacaaatatataaagattttaataacataatatgccttcactttccattcagtgaacacaatgctcattctttttggacatatatggaaaatttacaaaaatcaatgaagtactaggtgataggagaaccctcagataattttatagagttaattctcaaccagtatgcaataaaattagatattaatctaacaaaaagggaggtgaaaaaaatttattctatttagaaacgaaaaaacatatcactatacagcccttgaattaacaagggaaccattaggaaagataatgaaaaggctgtctgtcaaatctgctggacaacaatgctgtaaattctaaaaatatatataatgcaattacagaaaaatatttcaaattgatagattttgtgataggcccacaagtgtttgttaaattattttccatatttttctgtatatttaaaatatttaataattaaaaatttaaataaacatatattggacatggttaaaatattactcagacaaaaattaagagctttaaatatgcttattataacattaaaatttcaaaagaggaaaatatgaaaaagaaaacaaatgagttaagtgtttacagaagctaataaaaagtaagataataaatccaaagaaatggggaaaatggaaatataagataagaacaaatcaatgaaatagtgaacaaagatcaatatgaagattaacaaaggaaaaattagttctttgaaaggagtaataagatagcaaacctttgataagactgaataagataaatcagaaaaagaataagtaaaacacatactgaaaaggagatctacgaacaagtaattttttaaatactttttaaaaatatgaacaaacatgtaacaatacatttgaaattcattaaaaaaggattaatttatataaaggatataaaatattaaaatggcagaagaataaatggaaaacttgaatagaatgtaaaagttaaagatactgaagtggtaataaaatgtctccttcaacaaaacccttgggaaaatgatagggaacccgagaaagaagcaaataggcaatgaatatgaaaagataattcacagaatagtggagaaatacaacttcaaacgagatcccaccttttacctattagattggctaaaattaggaaaatgaaaaataccaaagtgcccccaactgaggactgttgtttctagtatggaccagaccccattcctgcactcctgctccagtgcatcgctcagaaaatctattccctccctccctcgctccatctctccctccctccctccctgcctccctccctccctcccttccttccttccttccttctttccttccttccttcttcccttccttccatccttcttcctttccttccttccttccttccttcttcccttccttccatccttcttctcttctttccttccttccttccctctctccctccctcactccctccctccatccttccttccttccttccctctctccctccctccctccctcctcccttcctcctttcctccttttcttattatattttctttctctttttgttattttatattggcatagacataaaatacatacatcatgaatgtactgcttgatgatttttcactcatggaatcctcaccatcaagaaataaaatacttcttgtacacaagaagtcccattatgcctctcacattatgagccaccatgcctagcctattttacttttatttttgaagaaaattcaaataattgcatagttctagattgccagttaatttctttcagcattttaaagatgttttattgtctcctagctttcaccacttctgtcatccatatttttgttcctttgaagttaatgtgcctttcttttctctcactgcttttaagagttttgttctgtctttgattttagaagtttcattatgatgggcctaggtatgtgttttctttgatcttttcctattttgagttgtagtgtttcctaaatgtgtggtttgatgttctttgtcaatacatgatattcttagctgataatctcttctaatattacttctgcctaattccttctttatccttccgatctcatcatttatggacatgggctttgagagaatgttaattaatatgtccaaaaaaatagggaacatgatggagaattttgacagagaactggaatatataaaagaaaatcaaattaaaagtatctgaaacttagaacacaatagtggattgaacagcagattcgagacagtagaaggaagggttattaaatggaagataggtctgtagaaaatatctagcatgaagctgtctggatgggagaaaatatatattttcattgaaaattcctgattttggttttccaaaaaaaagtcaaaattttgtcaacattgaatttacattcctcatagtttcagtgtgcctgagctgatgagttgttgatgtgctccatatacagggatatgtactcccaactagccacagtcactcctttctattatcttctaccactgaggctgaatattagttgtcatggtttatatcatcccttccctgctccacacatttacattgcgtgctgggcatgctatatatttgagttcatgatccatgttgaagatgccataaagacccaaaaatgtgaaagagacttggaaccgggtaacaggcagaggttggaactgtttggagggctcagaagaagacaggaagatgtgggaaagtttgtaacttcctagagacttgttgaatggctttgaccaaaatgctgatagtgatatggataatgaagtccaggctgaggtggtatcagatggagatgaggaacttgttgggaactggagcaaaggggactcttgttatgttttagcaaagagatgggcagcattttgccccagccctagagatctcgggaactttgaacttgagagaggtgatttagggtatctagtggaagaaatgtctaagcagcaaagcattcaagacgagacttgggtgctcttaaagcagtgcatttttatgcattcatgaagagatgatgtgtaattggaacttatgtttaaaagggaagcagggcataaaattttagaaaattcacagcctgatgatacagtagaaaagaaaattccattttctgaggagaaattcaagctggctgcagaaatttgcataagtaacaagcaaccaaatgttaatccccaagacaatggagaaaatgtctctagggcatgtcagaggtcttcatggcagcccctcccattacaggcctggagacctaggaggaaaatatggttttgtaggctgtgcccagggccttgcagctttgtgcagtctcaggacttggtgccctctgtcccacacatggctaaaaggggccaacgtacagctcagcctgttgcttcagagggtccaagccccaagccttggaggcttacatgtggtgttggacctgtgagtgcacagaagtcaagaattgaggtttgggaacctctgcctagatttcagaggatgtatggaaacgcctggatttccaggcagaagtttgctgcaggggtggagcactcatggagaacctctgctagagcagtgtggaagggaaatgtggggtcagagcccccacactgagtccccactggggcactgcctagtggagctgtgagaagagggccaccaaccttcagaccccagaatggtagatccactgatagcttgcaccatgcacctggaaaagctgcagacactcagtgctagcccgtgaaagcagccaggagggggactgtaccctgcaaagccataggggtggagctgtccaagaccataggaacccatctcttgcatcagcatgacctggttctgagacatggagtcaaaggagatcatttcagatctttaagatttgactgcccagctggaatttggagttgcgtggggcctgtagcccctttgttttggccagtttctcccatttgggatggagcatttatccaatgcctgtacccctaatgtatcttggaagtaactaacttgcttttgattttacaggctcctaggtggaagagacttactttgtctcagattagattttggacttggaattttgggctaatgctggaatggattaaaactttggggtactgttggaaaagcatgattggttttgaaatttgaaagggacttgagatttgagaggggctggggtgaaatgatatggttaggctttgtgtccccacccaaatttcatcttgaattgtaatccccataatccccaaatgttaagggagagaccaggtgtaggtaattgaatcatgggggcagtttccccagtgctgttcccaggatagtgagttctcatgagatctggtggctttataaagggctctttccccctgcgttctgcacttctccttcctgccaccatgtgaagaaggtgccttgcttccccttcaccttctgccatgattgtcagtttcttgaggcctccccagccacactgaactgtgagtcaattaaacctctttcctttgtaaattaacgagtcttgggcagttctttttagcagaatgaaaacagactaatacaatagagtctagcaatagagtggagaacaacatagttacaagctctgccctcagggaaaagaaaacaataatcacataaataattagaattgtcataaatactctgaaataaaagtaaaaaatgctaagagatccatcatattttccagttggaaggcagggaatgtttctcccaaaaaggttatttaagccgagttctgaagataatatgatttagtcagatgaaggcctggttatatgtgtgttgatggagaatggacagagagagttgatctagcctggaagagttggacaggtctgaggattcaaagcaagtcagtagggctggtaacacatatatgagcagaaactgtgttgtattgggctgctgagtctggaaaaatacataggattttggatgcctttgcagaccaagcagctaaggaccagcacatttcatggtgacttgatggtgtgcaaatttggtccctctgatgaatcttctagttgaaataatttatcactgtgaaattaagtcatcaagtataagatgaccagctgacttttagccaggtagacaagctatcgacttggtatgatgaaacatcactgagttcatttttatgcctttgtttcctctctgtctcagctgcaagtgtccactgcttgggaaagtgtgggaagctgacttggaagcttgtcgattgcttatccagagcctacagctccaggaagccaggggaagcctgtctgtagaagatgagaggcagatggatgacttagagggagctgctcctcctattccccccaggctccactccgaggataaaaggaagacccctttgaaggtattggaagaatggaagactcacctcatcccctctctgcactgtgctggaggtgaacagaaagaggtctgtccttttcacatggcctccagaggggacccttattctaaggggtgctttgggaccatgctccaaatgggaacaataaatattgggaaggcttcccattgagcatataaacttttaaaagtttcaataactcttgaatatgattacaaaataaagtagaatttttgtagaagtttgaaatatagaagagcaaaaaaacccaacttttggcatatttagttccattttcattctaatttagtggctagaattagaatatgcagtctaatatagaattaccatatatagcatacattatatatgtcatatataatatagttattatattcactatagattatatatgccatacatgatatttaacatatatactatacattatgtattgtatgtcatatatgatgtttatatatttagaatctatatattacaatatattattatttatttgaatgaaacattcaaatatatgtatttatcccattaattgtttttaccaaaaccagatcataatgaatgtttataatgttcttctttcataaacacaactaaagtttggcctgagatatatgtattacaaattaaaatatggttttatttaactttctttttctctcccctctttcctctctcccttccccttccactcctcactttcctcctcccaccctaacaagagtcttttccataaaaaggccctaggaagtttttcctgatttcagtgccatgacctgagtcttcagagctctttgttggcccaggttcacaggtgttgtgagtgtggaaaggaaatagcatggagaggctggaggaacttgacacatggctttcaagtctcatggttgatgttagatgttagctgtgcttcctccctgggtctttgccaggactcaccactggtgggtggggaaattgccacctccccaggccagccctgccagtctcacatcccatctgcaggaccatggccttcagagagcagacatttgtgttcttagtcactgcctctggactgcttagaaaatcgatccttgatcctatatttggattccatggtcttataagaaagcaaccactgtcactctgcatccttgctggcccagtcacaggctctacgttaatttatagacatctgaactcgtttgttaacccaggtgctacaggtggaatcctccagcaaagcctggtctccaatgctctgggtagaggtgttgaaaagttaccacctgctgcaagtggatggcttgaaagaatattctggggtggagggaagtgccacctaagcaagggtttattcctgggtggaagaaactgcaggctctgggaatgagtctttgaaggtgtgtctggctttccaaagtgagctaccaggaggagctcggtgtggggcagtcagaagccatgccaggtatgtgatggagtccctgggtcattgattctgctggaggccaggactgattcagcagagatccctttctcctgtagcggagaaaaatgaatatctttcctttacccatctaaaggttctcagctgaggcacctatacagacagagtaacaagagaaaaatgtacaaatgtgcttaatataaaatttacatgacacaggagcctgcaaaaatgaagacccaaagcaacagaaaccagtgtatttttatgcttaagtttgaagaatagcagacagatgtggagaagtataattggacaaaaggagtatgatttaatggcaataaactggggggagcttagcaaggcctgtttgctcggattcttcgctgcatccctgtgtcttcagagataaggatactcctttcctttgggtataggttgtacactttaaagatgagggtgttataatctactttagaggaaggtcagataattatttatggcctgcttcaggaaagaatggctgcagaaggtcagagagactttcctgcttctgctgttcctcaaatgccaaggtgccatattttggggtagtgtattctgaaccccatcactctctccctccctttctccctccttctctgccctgcccactgagccctgagccctccaggttctctggggacagactttcccaggcataggaggattcgttttcctgcatagcattataagcacctgtcaatttcactatctggctataagaacacagagctatatttgttgaaaaataggaagcttggggtcaaggatgaaaaaagagtggagccttatcctaggtcctgtggtggctgctgtttgggtgctccaggggtcccccagaaagcctcccagatcctctccaccaattgaaatgctgaggatgtcctacatttatttgttgctttcttgggggtgagtgggtgctttagaggggaccttacagcttttgctggctttcagtatcatttccctgttcctgtatcgcagtgctggatttattttcacagagagggcagccgttctctgaattcatgagtgccatggattttaagacaatgttttctgagaacggcaaaattatggggccagaaaacagataaattgttgccaggaaaggggaagggactcattacaagagcaacaggaaggaatttggtgcgtggaagttgggggcggttgatagaagtattctctctcttgattgtggtggtagttacgtgactgtgtgtatgtctaaatccataattttacatcagaaagagtgaattttactgtgtatgactttataacaattattttaaaaagtttttttaaatgtctacctatttaaaaaccgggctatagatgtttgagtcagtgcttttgtctcagggctatcaaaacgcagtgtggcctgctggaaagagcacaaggcttgagtctgagtctgccgtgatcctcagttaggcctcttacaggccgcatctccacatctgttaagaaaaacaccaccacgacataagaggataatgaaaactatctcatgaagctgtgatgaagatttaaataaaaggatgcatcacgaagtgagagacgcatacctagtagaggctaatttgtgttaacttttgtttctatcactctttctggcagtcacaagcatctctaaaatgctttttgcatgcataatgctagcaacagctatttgtttgtatgactcagtctccaggcttaactttcccttttgcataaggagtttgggggtgcttgagattgttacattttcctttacatgtataatatactcactttttgtcaagaagtagacatgagcaatgagttagtggaagatacccagtcagagaaaggtttaacgaaggaaaactcccgtttgtattcgggtccaggattttagactacagaaggtatggggaaatgataacaagggcctcattaggaaggtgcttttgttttcctgcctgtgttttccgggagccattgaagtctgggtactttgcatttatcctgtggctaaaatgtctattcgctttgcagctctgggttggttttgctttagaactccgtgctgggtctgaccatcctatactggtttctctactgaagcttgatgccctgaaggcagtcaatttctttttgacccaaatcttccatgaaaaattactgacttcttatagaggtccacaggaagatgagttttcaaagcctttcccgtgcttatctggccaacgtggtgatgtgcattctggtgatactttgttatcacaagggctttgtcgttgatcgacaccttcctgggtctacggtccttgccaggctgctgagcaccattcccccattttacagctgggcccattaaggtgaagcaatttgctttggactttgttacagaggaagtcagcaacagggctcagtgccaatcttagcatgaacttcctcgaattgtaagagcccttttcttttccagtttcatgacagctctcctccaagcctttctgaggactctggaaactatcagctgctgttggccctggttcgtagatgttacagaaattgaatgggggccagacaggagccagggaaatcagtgagccaggcttcctccgctgtgaagtggctcttttgtacgggctgttctggccataatacctgcgtaatttttttctttcctgtctgcaacctagcctgcggggtgctttctgtttccattgctttttctacataatgggctccctggacagtaccactctcccagacttctcatcccagctgcttcctttctgagccagtagctctcaccaaagaggccaaaagaggacctggcaatgttgagtcattgcgtgcagtatgtgagtagccagtgtgtgaacacagctgcagtgaacggaattagcaataagacacaacgcaaccaggtagcctcatttgttcagattgaggtcttcaaaaagcattttaagtttacgggtggaaaggtgtgatacctttcctcagccatcattaagggctaacactcctataacaaaaacaagttaacgagaaaaacataacacatttatttaatcagagttttacatggcacaggaggcttcagaaatgaagacccaaagacccaggaaaaactatttttatgctcagatttaatgcagaatagtcagctatgaaggaatgtgattggacaaaatgggtatgatctaatggttatagactggggggtgagcggaccagcaagccctgtctgttcagattcttcttggacgctctgcatagtatttattcctcttgggtatggggccggactcctctaaatggagggccttcaagggagaaggaagagagtgacctttctaggttttatgtttgctttgagggagaggagtcctagtttctaagactggctttgaggaagaggaattctggtttctatggcttgcatccagggagaaaaaggagtgtgagaggggagggcaagagaaggcagagagatcttgcttctgaggccttccaatctcctttggttcaaagtactcaggcataccaaagtgtcacacttaggggtatcatactgtgagccacaacataaatatctccattcctttttactcaatttcacataaaaaaagctggaaaaggtgatccacaatgaagatgtttgtcctccttgtcttaaactgatttctatatctagaaatgtctttattgggcaaaagtgcttcctcttcagccataatgggtgcagatctgattctttctcttctctgacacttactggccctgggacagctggaaactcactttgactctccaaggagcacatccctaaatgtgtgatctcttgatatctctcccacttttgaaaagaactgacaagggaaaaatgttcacttacccatcagctggttttgctctttttgtttaatgtctttggggagaaagcaaagagctaggacatgaagaaaacttctatctccactacattttgaagttttgcaaacccagccatctttcccaagagcagagcagtagaagcaaccaggatgcaaccagggttggtaattggttggttaattaaaaagtcagaaaagacagagagtcataaaagatgatgcatgcgtattttaaacctttttgtttctagctgaaaacatgccctctcatttgctattcattcgatataggaccaagtatttctgtttgtagagcctgctgattggcttttcacatgaccctcgttgtgtaaacctcacctatcatgcatcattaacagtttccacttttggtgtctttaaagtgggctggaaacgttaagagcacttgcaaaacaattctcagcctccccctctctcttaaatgttattgaatctttccaaggtttccagcttgctttttatggaaacaagcacttgttttcacattaatatttcatcgctctacatagtatttatttagattgtataattaggatatttaaatataactggcctacagaagtgaagaaacaaatgcaacttgaccaatagaaacagaactgcgcaggcttaccaggaccctgcccctggcctggccctggccactgaatttgagagagaaagcagagtccagggacaagctggcaggtggctaagagaggtgtttcttctgttcagtgagctggctcctgcttgttctctcagttaattactgtcatcagcttgtcagcctccttcacctgcccaagggaaggaaggggactcctctgatctgctggcttctccttctttcggaatatggtggaaccttgctccatgctccagggcctcacggtggccctttttccactaattaaaaatagttcagcgcttctgaggaaaacaacctcagggctcttggtgacgccgttcaccttggaaattccttgtcattcactggtgcagtctgagggatcgatagcaggatggcgtctgcctgaatggcaaggactcattttctgcgtttgtaacagaggaggtgttatccaatgaatcctcagtggtgtcctgggagtagctgagaatttttgtaatgtggaaaatcagatagcaccctgccccctcatcacagctacagtgcatttgatttccccaccactgggcagccagggcagttaaagtcaagagcttccactccccaggagcttccggtccccccataagctggtcgtgagctattcctgcccttcctaactaggagcaggcaggagatgaacactggagttccatgaagctcctgtgtgaaattatcttacctctacccaagacttactgcactgcctttttcagtgaatcgtttaatgccttccattctgaatatgctggtgtttctgctttgccagccattggtcattccacaccccctcctccacccggcccccaggtatttcctggaaccattgattatggcagagcagatcttattttgctcatatgattaggaacctcaggccaacaagcttgggtaatagtgagagaaaagaagagtggtcctttgctcttctttgtctgagtgccttttgagggaaagagtagataccaccaaccatagcatctctatctctttccagcaaactacaggggtgcctgagactttagggtgggaagcaagctctcacttggaaggggtgacatccagaaccaggattaaacgctgacatttaaaaacagtaactatggtagtcttaatagttgcacagtttacagtgaaacacttagagttcaaatttgttttactataaagtgaacatggatggagtttgggatttgattctgtcttcatagtttccctttacagttcaatatttcttagctcaaagaacacattcccttaaaaggaatccctcaaaccacttttcatttttattttcttatacaaaagggccttagggttggatgtccctatccccagaatctgaatccttttattaaagggactgtatctaggtactagccggtgccatgaatctcattttggattcaaatggattattttctcagagggttctaatgaagtctggttttattcagatttgactatcaaactcagtgtgcttaaagaaaagcagttcacatcctcttgcatgatcgtgtaatataaactgtagcttttcaaaggttgcccttcaagtaaactagaaaccacaggccaattaacatatgccaattagcaagcaatttcttcttctaacaatttgtttggttctgttaattacttttatttagagcttgtttctccgagccaccttcaaaacaagcatgcagatacttgaagacaattcattgcttgctctgacctaaagagatctaaatatttcagatgctttctttaccactgacgacatctggatgcttttaaaagaaatacgcagttactcagggagtaaccgtataatttgaatatgtggatgaatactcgtatcagatagagtaataaagatatacccttaatgtctcaattttgcctctctgcttattggcatttacacgactgtagaactcggcatttatatgaaaagacaaacaccataaaatctatgtcaaatacatgtgaaatatattctttgtgttgtgggcaggcatttgtttgaagtaaatattctttttgtagataatattttaaaaagaaagacaaaaccatatcgcattcctgaaatgtatttaccaagcatgtattttggaaaacagcccaaaggaacatatttaaggcagtgattttaatactaaactaaggaaatagtttgatgcatcagctaagctcatggatgggggtaatcacatctggtttacctcaagccagaggagaaggagtgagacttgacaatgtaacaaccattatgaggctcaagtagcgtttttggcttgtaagcatgtatgtgtgctgtgttcaattttatgttttaaatttttttaaaaaacttaaatactgctatagccccaaaatatgtaaaatatgtaaacagttggcttgatggccataagggaacacctgtccttttttttttttttttttttactgtgtagcctgtgactttcactgcaggaattaaatatttttgtggataggcaaatgtacttttgtggataggtattgctgatgccttattacacagccgaaggaaataaggatctgggtaagcagttgagtcacggcaaagagtaccgtatccaaggtggaggttcatgctagagctacaggtactaacccctcccctgcaccactgatccctagcaagggtggaagtaactgatgacttctctgcacagcccccagcacaatgtctgaaagagagacctaaagggtaactgcctgttttctcagattaatcttagaatcctagcagtacttgttacttcagtttggagatttttcttattctatttcttcacactcttacagacttcacatagcccctccctttagaataactcttgacagcattttaagaaatagactatttaaatcatcttgatccagtgactcaacccaaggtgtaacccgtctgctcaaatttgtggcaaatctccattgatgataacatttctgcaaatgtatgctctgttaggtgtggaagcttttcctaagtagaattggcagccacagtagtacctgcctacctagcaatttaacttaaacagtttccttttccaaaggtattttctattcagaatagaaataataaatatgatttcctcatcactctagatacagcctgatgagatattgttaccagatactttctcttatcaaaacaaccattattatttcataatatattccctaccctttgaatataagctccagttctaaaattttaaatgttggtatcttccacatgtcatagggaaagacttaagccttgtttatgggaactataactgagtaaaaatgtccttggagaccctggtcatggaatttgtgactgttcttctactggggcatgtggtttagacatctgctcaggctagcaactgaatgcttttctgggtatacacttttatagaaaaatgttttttgaaagtcactttaatgggaaaatcctgcccaacaaaggaaatcctattttctgtttttaaatcatgctccctgagttgggtgagcaggacagaaatttgacatcagctctaattcaacacagctgaaaatttctgcccaaacattcaggcctacgggttttgatcatgaggtgagttaagcaaattatatttgaaatattgcctggctgagtcggtgctactgaatcatacccgtgtggagggacagcagggaagatggtagggctttattggaggccaataaaagccatgtgtgtacagcagtactgtggagagccccaggaccccatggctgtccctgtggcaagaaaattatcccagataaggctgttcttggctgcactgaggcaaaggcatgtgctcagcatccagaaaggttcttcttgttggttttccttcctggctctttatacttgggtgaaatgatctcttggaagtgtagtctgaaaaacagcatagcttcttccaagttctcataagatacaggagtctccattcattacttcaataagcattactgagcaccttttatgagcaaggtaggacgacggaggcagggccaggacctcatcatctggtgagggagacaggcggttacacacacagggaggaactcctcctacccagaagtaggcagggttggagattcgggattgaagcgttcctggaagaagtggaatctgcagagttttgaaaagagggggtgttaggtgtagcaatcagaccatttacctgttataactgcttttcattctgacccacagggaaaacaattattcctagggttaaatgatgggacggatgttcagaaaggaaaaaaataataatttgaattgctgaaaggaccgcctgacaagacaaattactggagagtcttcaaagacactttgaaatgccgagcaacctgtactttaaatgatccgttcagaattgcaaatcctacagaactccatttctgctaggaatcccagtggctttgtagtgggtggtatttttaattatcaagtatcagtcttgcaggctttctcttttttgtcacatttgatttaaagtacaaatgggagcaaaagttacaaattgcacacagagagacactcagtgtgtgaaattgtggacatggttcagaatatgtttatttggaatccgctgaggtgatgggagagatgggactggatactcatgttcttatttggaaaggagacattctcgccgcctttcccatgtgcccgcttgcttttctctgcttccagcctgatattttatggacttgtggatgagaggtcctgtgcccatcattgcattccagattgtcatggctgttatcattgtcacctccactcattatgcctctgagtcctggagggagcatatccctttaataagactgaaccctccaggaattgagactttgcagagttctgagagtagaagggaagagaacaccatgtctacaggtgctggctgtttgcttctctgatttctttccatcaccactttgcccaagttacatgactctttggccaggtgcggtggctcacacctgtaatcccagcactttggggggccaaggcaggcagatcacctgagatcgggagttcgagaccagcctgaccaacatggagaaaccctgcctctactaaaaatacaaaaattagcctggcatggtggtgcatgcctgtaatcccagctactcgggaggctgaggcaggagaatcacttgaacccaggaggcagaggtcgcagtgagccgagatcacgccattgcactccagcctgggcaacaagagtgaaactgtctcaaaaaataaataaataaataaaaaataaaaggattcttcaagcctcttttcttgtatgtaaaagaaggaattgaaccttgaggatggttcctaagacccctaccaaatccagcagcattctctgcttctaggtattaagattctcagggaaggtttccgacattcttagtagccctgaaggaggcagatctttgtaaatgcatttgctgtcctgggaaacaagatggtgttaagataaggaagctccatttctcttgcagttataacccaaggcagagcctcctgattaatacacctggcttacaactcactattttggcttaaacagaaatgtcagtgcttccaaagctttcactgagacaccttctttgaaaaaaaaagtttcttttattttaaaagaagcaaacaaactctcttcaacagctccctttatttacttatttatttatgtagctttctatgaaggcttagcaaataaaacagataaaattagaaattgaggtagagttgacagtaaaaacccttttcctcctaccaggggatctctgcagaataaggcctaaagcccactggtttgagagaacatcctccagcaaggtgctttccaagcaagggaaaaactagaagtagtgaaatacacctgatgcttcctgcagagactatgccatcctgtgtgaccgtaacatataaacatcacataccaggaggacatgatcatttaaatagacagcaatgttgtccttcagtctaggcaatgggtgtgccccaaggccagtgtgagggtccgggagacaggaatctgtatatttcttacctgcctctcatgatttgagcaccttgctctgctaagtgtcccctgaagaaagagccacttctcccaaaggtggaagaaagtgaggccctgtgggtcgtattgcactcagatatgttggactcactgtggtatgtcttcctgcggaattttctaggaaatttttactgtacttgttctatacacacacacacacacacacacacacacacacacacacacaaccctcagaatatgtgcctgtactgttcaataacttacacattgaactaggagccagggatctgggattactgaccagtggcagtggtcacttgttgtaatgtctttgttgcacttcccagcctaatggccatagtgccctgcatgggtaggagttcccctccctgagagaagtctgggcattagcactttagtgagcttcaaaaatctagtcagtcaactccctaactaggtaccagtgaagatgcactacctgctagcattttgcaatagttttatccactcatgcgaggttctgtgtagggacaacccatgtaaggcccctgttttacctactatggctgcatcaaaatcaacacaaacttagtgatttaaaagaactatttatgatattcgtggatctgtagatcagaaattggggtggggcacagtgaggagggtgtctctgctccacaatgtctgggtgttagctgaatgacttgaagacaggggctgggaccatctgaaggttcagtccttcccaagtctggctgttgactagggctttagctgaggctctcatccagacatctacaaacagcccgtccatgtagctggggcttcctcacaacatggagactgggttccagggtgggtgatctgaaaagacatgtcaccttttatgacctgactttgcaagtcaggcagtgtcaccttcactatgttccatacattgaaggaatttcaagggccatccaggtttaacaggagaagtaataaactctgttttttgatggtggagaggcaatattccagaaaagtgtgttgctatgaccacacctacactctgccatacctgggcatggcatggaaatggccaaggaagttttgcctagtccctcatttatggactaagaggcaggacctgggcaactttgcacagctgatacccatggttcttttttttttttttttgagatggagtctcctctgttgccaggccggagtgcagtggtgcgatcttggcttactgcaacctccgcctcctggggtcaagcaattctcctgcctcagcctcctgagtagccgggactacaggcctgcaccaccacacccagctaatttttgtattattagcagagacagggttttaccatgttggccaggatggtctcgatctcttgaccttgtgatccacctgcctcggcctcccaaagtgctgggattacaggcgtgagccaccgcacccagccaatacccatggttctgatcccaccctgctctctctggacagacagatttctttggacagaacagaattttttaccagattgatagaaatatattaatctaccctctcatcagctgtcaattctcagtttaggtctaaactaattctattctcaagattccaagtgagagcattatagtaaaataatacatctcttaagtcatatctacccagttcacattcagtatcctctcagttcagaatcagaagctgtcagaccaacaagtagaggttcctgcacaagcctgagagagatcctgtaacttgtgccttggaaaaacagccccacgaaagaatgccagacagatcttctcttagcaaacatggtgacttgagctctctgaatttgttcccttatgctacattgtttgttttttaatctctaaaaaaactaaaaaaaatttcaggtaaattttcttcctttttcattatggtttgaattagggtttttgataactttttttccaaattttagggatgttaaaggttcaggaaagtataaagaagaaaataaaaatttcccataatactgccccacaaataataattataaatattttgatgctttgcctatttgagttatttcatcatcattaaatgctcttttattaaaaatgactttaatggctaaatacaaatctgctgtaccagaacttatttaactattccctttattgtttgacaattatttcctctttcctatacttttaatgccatcatctttgcatgaaaaatcttttatttctatttgatatatgtgataggcattcttccatgcttattacaagggcttaataaaagttatttcaatttaaatgaacaaattatttctttttgatagattccaggaaaggaaattattgggtcttaagatatgaacaatttaaagcgcttgttatgtggtctgaaattgctttccaaaatttatgccattactatcaatctgcacgtaatttaaaaaggaaaacaggcaggaattatatgtttgggggagaaatgtaaaactgtattttaaatttgtttaatttagctctgatttcatatttgttgtagccgtaagatgaagattgagtcatttgatttcgtttaagggtgttttaaattccttggttttctgttctgagtctatgctttttctctctttaagtgtgttttcagtcatatatattttcctgctaacactgtatgtttctccttcctgtatgatttgtggtttcatgactgtcaatcattttttcccagatgttctttttcttagtgtctcatttatttcatgtgtgatgacggtgttgctcattatccagtgtctacacttctgtgtaatctcctaccctcaatttcatatctttgattattttagggtcagtaaaaatatatatatatatacacacacatatatatgtatatatgtgtatgtgtgtatatatatatatatttatctgtgatttttatgtatttgctgtcttctcaccactgttatggtcaattttgagtaaaccttcaagggtgcttcacactaaagttcctttaattgtgtccatatgtccccacaattgtatgttattgccactagatttcttttctatatacacttacttgcagtaaatgcgtatagtcattctgtagcttgtagctcattcttcagtatactagacttctccaatatttacaagttatttgcagttcccattagcactattttattctaaggtagttggccattggcatgtaaattttaaagctaatatagcaaaaatcaaattatatacttggatttaattgttatttgtggaatctgattataatattatataatgcataatctccagactttttaacagtgactattaccgcacctgggcattttgttgttattgttgggtattcattgtatcttttgtagtaaacttgtagtttaagatgaatacgtatcttaatagtttcccttatgcaatttttttttttttgagacagcgtcttgctctgttgtccaggctggagtgcagtggcatgatctcagatcactgcaatctccgcctcccgggttcaagcgattcttctgcctcagcctcctgagtggctgggattacaggcgcccaccaccacgcccagctaatttttgtatttttttagagagggggtttaaccatgttggccaggctggtcttgaactcctgacctcatgatccacccgcctcagcctcccaaagtgctgggattacagctgcgagccactgcgtctggtctgcaaaaattttttagtgtatcttctaagcttttcactcttagttaaggaaatattatctttacatttaagttttaattctgagctcatttcttgcttctccccctgctttattctaagaatctctatcttctgttctcattttcttaaccttgtttattgttttcctttacaagtctgtggccttctacatgcccagcattcaactttgggccctgggatgaatgactaacccatggcccttacctcacttgagtggacacagaacttatcagaatggttgcactacaaggtgaaattattatttggggcctttgaaggaaaggctgggtttcagagaagagtggggaagaatgcatgggcaaaaagaacagcatgagagagggcaacggggttagtcctattggcaaagcttagcttgcctttaggagagttgaggggatacagctgaaccatgggctttgtgcgaggtcctatgaagacagagtttagactctgctctgtggtggtttcgtgcaggaaagtgacataaagaaggcccttttctggctcatagaaataagtttgaagggaaaaagtgagagaaggaaggagctctaagacttaattgttcattcatcaaatcgatcaatactacgtgcctgtcatgtgccagatactatgccaggggctctagggatagcagcaaaaagacatcatcatcctgctctttttttttttttttttgagacggagtctcgctctgtcgcccaggctggagtgcagtggtgcaatctcggctcactgcaagctccgcctcctgggttcacgccattctcctgcctcagcctcccaagtagctgggactacaggcgcccgccactacgcccggctaattttttgtattcttagtaaagacagggtttcaccgtgttagccaggatggtcttgatctcctgacctcgtgatccgcccgcttcggcctcccaaagtgctgcatcatcctgctcttatgcggcttaagctcccatgtatggtggtggtagcggcggctctatatgcagtatacacctcatggcacttaaattctagcattcagggactgtggtcagtgtgtaaacaaatgttcagtgccctagtcaattcctgtgtccttaaaggaatattccctttgtccttacaggttagcccagttgctcctgtgacccctctccccactttttttagaatccctattaaattttgaatttgcccattgatacagctggaagattcagggtttctgtttgataaatccacttcgggacttgacatactggaagcagcactttgaaatgaccagacaagggaggtggcctgtggaactgcatagacaaagctcattctttggtcataacttgaaatcagttcacaacttctcaagtttgatacccaggggagacacaggccctagcacaattctgactgaggtgcagaaactgggagagctctttccaggaagcttccctttgtgttctgtctgtgtccacggcactaacaagtgatcttgttttccccctctcgccaggaatcttacatcctttctgcagaacttggagaaaagtgtgaagacataggcaagaagctattgtacttggaagatcaacttcacacagcaatccacagtcatgatgaagatctcattcatatccttttcatcttgcagatgaagcaaggcaaagttattttataaaagagagtctttaaagggtagtttttcatgcctcagaagatggcaacaaatagatgctgccgttatttatagcacagagcacctcagatctctgagattatcaggtatgaaatgttttcgctctagttttcagtaagcaattcagtattttttttcttttttcttttttttttttttttttttttgatgccttggctggagtgcaatggtgtgatctcagctcactgcagcctccacctcctgggttcaaacggttctcctgcctcagcctcctgagtagctgggattacaggtgcccgccagcacgcccagctaatttttttgtatttttagtagagagagggttttgccatgtttgccaggctggtctagaactcctgacctcaagtgatccgcccgccttggcctcccaaagtgctgggattacaggcttgggccaccgcatccggccgcaattcagtatttttaattgctaaatccaaccactaacaattaagttcagacatgcacacgaggaagccaaagaaaatgcagtttcaagtgagtgtaaatccagctctgtgtggccctggtgaaggaaaacagttgactggctcgttttcctacgagctttttcaataccaagcgtcctaaatccacctctgaatttctttatctagcaactctacctagtaatgggcagtacagtaacaaagcaaacaggactttagattatttcctttcaacttctaaccatatacacatggttgaactcaatttagtcctttctgcttcccggtgatagaatttcttgcaccagacttaatatccttggtgtcacacctacaaacaccttcatcaaaactagctgctagtgagcaagatggcctgagaacatactggcttaggtatgcatccgtatgaagcactccattctgtgttgatctgtggacgcagtttgtcactggttagttctgctgagagcaaatgggtgggtacccagtggatgaagggatatgcagccctatatcctttcagttatttaatcacaagttgacacttctctagctaaaaacacttccctattcattcatctttctattcagtagaatgtcttttattagatgcgtttgtggcaaatttagctattttggtctttgcttgtcattgctgtcttactttttagaattccagtttttaccatactttatgggctgtgtgtgtgtgtgtgtgtgtgtgtgtgtgtgtgtgtataagtagctttgaatggccaaggattaatcttagtcataaatactcagatctgtgatttaatgatagagccaatgctacacttccttccttgttataactttacatttttgaccttgtttattaagctgggcagaaaatttcttcaacttaatctgcaatgattttcacattgctttaggtagattttgaaaagcagatattctgttcttcataatttcctgcctcttaaaaatcttgtatttaagctattatcagaaagtttcccaaagaagcatacaaacatagaataaggatggcgtttttatttattccatgttcatgggatcacaaatctttgagcacgtgtaagggggtatggcttccagcaaatgggcaggtgatggggcacagaggaggagtccgctgcagagagtcaatggatatgaaggggttcccgttccccagctcagcagatgggcagttcctaagtgggttgtacctctgtcttcaggtagcagttctgagggctgcagtcagggttctgtactggtctcttattgtgaaattttctaaaaggttagtttgattctggggaattggatcttatttttactagagctggggaggcagctctagtaaagacccctgaaaaacaaggggttaagcagtatttaaacaagatccttttagtttttccacagctgatccaagccagatttaatagcagcgggatcatggacaagtgataatgcctctttaagcattagggttcccatctgtaatgtcaggataacatacacctctaaggtttttatgggggttaaataaggctatattcataatgtacatttaatatagccatgggtaagtgcatgattttaggtagaaaagtgttatccaagtccatttgtctcacagttcttagtatattagtcacaagctccaagaacatcccatttatacacaaaaagtttcaaggtagattgattcaactattttgtaataaatgcttgaaggaatcaatcagtaactccacagtggcttagatgaaaagtcatttaattataataaaacttctataaatggatagggattattatccctacttgacagtcgaaaaaaacaaggcttgggaacaacttggctgacacaaggtcatttctgatgagtagcagaacttttcagccacaagccccatggtcctattaggcccatcagaaagcagccattgcctataagtaaatggacaggtctgttccatggaacacacaattactttaaatttttaagctataataaaagtatttcactgatgttatgttttttgagaatttcactgatctctgttgtgataagcggagaagcactggtttaggtactgaagtcagctctctccctccctccaataaaatctacaccacgatatggatttcaacccagacttttcttcgaatcccagtcttctgtcactgattgagaataaatacacagaaggtgtctttgaattcatacaaagcagcacttaaatttgagtggaacattatgccctaagatagaaagacatgtttacaaggctctacggaggctcccctacacaaaccaaagccgttgtttcaaattagagcttatctagagattcagagaggctgccagaatcctccagccaaactctgactggtttgtatttccatgtttgatcaaagatacaatgctgagtgtggctgaaagaaacagcttgttgtcaacaatacagaaggattgcacagtgagtgcagtgttttgtttgattccattaagcatgctgccagagcctactgtgcatgtgaggtacccaattaatctaagtccacattggaatgtgattaatgtaagcccacattggacgtccacgtctgaaagattcaagccacagatgctaccatggatgtttattctttgtgtggaaaacactcagtttttgcataaaccatgtgtgtacataagggctattagtgtggcatcaacagaggttaggggtgggcagtgggactgagtttccaaataggtccttgtggcctcctgatttaatatccgagttatgggcagcctcatgggtgtctcctacttttattaagaagacactgattgaccaatccaaggagggagaggaaagagcctttgcctcttcatcgtcctgacaggctcaccaaattacatgtagcatgaccaaagaacaacacaaacccatcagctactgtggcagcgagtgtctgaaaacagtctgcaccattaattgggagagctggtggtggagaggtggctcacgcctagtgcctgagaaggggacaggaggtgtgacttcacggccagtcaagtcgggacttccaggagcattagtgtgagtctctagtgcattttcacagtcatctggggtcctaattagcagtatgttttgaaaaacattttgactgtgtgcaaggtctcctccacgctcaaaatattgtaaccaaaagccttccaaattaaggtggatttttaagcaggaattttctcattttcttcctccttcaatttctacaacacactttcaaaggaaaagaagtacacctgtgatatgtacatttttggcatatttcaaagccctcagggcagttctgcctggccctcagtcatagacgaggtagagacactctgattctatttgtggttgtatttacatccatgtctgggaagcccttatggaattctgtttctctggttatttggagtgcatggtgcccaattgtttagttttggtggtgcttgagggcatgctctaaatacatccaggtttgtgcacaaataccacagctccgtaggacccttgtttagttcaactttccaaattttagcgtgaacagacaaaggtaacgagagttttgggagactgtcctgcctccttggagatgttttccacttctagagctgaggggctggaagagggatcatgaggatcatggagctccactcatgtagtttatagataagaaaatccagagcctggccaggtgcggtggcttacatcttaatcccggcactttgggaggctgaggtggatggattgtttgagaccaggagtttgagaccagcctaggcaacatggcaaaaccctgtctctattaaaaatacaaaaattaactgggcgtgatggtgcacacctgtagtcccagctactccagaggcgtgagaattgcttgaacccaggaggtggaggtcgcagtgagctgagactgcacactactacactccagcctgggcaacaaagtaagacactgccaaagaaggagggagggaaggaaggaaggaaggagggagagaggagagagagagagagaacaggaaggaaggaagggagaaaggagagacagagagagaggaaggaaggaagggagaaagagagagagaaagagaggaaggaaggaaggagaaagaaagataaagaaagaaaaagaaagaaaagaggaaggaaggaaggagagagggaaggagagaaaaggaaaggaaaaggaaaagaggaaagaaaaggaaagggaagggagagggaaaggagaagggaaaggaagagaagggaagaagggaagggagaagagacaagggaaaggagaagggaaaagggaaaggagaagggaagggagaagggaagggagcaaaagggaaggaaagaaagaaaggaaaggaaaggaaagaaagaaaaggaaaggaaagaaagaaaacccagagcctaagatgacagtatctaaagctttgtgtgtgatgggctggtgcagatatagtagtcacagttctttccttaggctctcacttggctttggagtgggacggggaagagttggagccccacagtgggtgggggagggcaagggcgtagacacagggctgtcctgctgctggctgagcacgaggtgggcttggcacaaggtaggcaacacagagtttctgtgtacaagcatcaaatcctttgaatcaatcttgggtatagtcaaggttttcctctttgctcttgaaagactgtgatcctcatggcttttccatgaggatctccagtaccaaattctccagcactatgggctgtagtggctacccaggaaggaatggtggtaagaagaaataatgtagcaaaagagtagcactttcaaaggataagagagtcccttatctgaaatgcttgggactagaagtgttttgaagttctgctttttttcagattgtggaatatttgcattatacttaccagtggagcataccaaatccaaaaatcccaaatctgaaatgttccaatgagcatttcctttgaacatcacgtcagtgctcagaaggttttggattctggagcatttcagattttggatttggggatttgggatgctcaacttgttctattgtttctttttgaatcaaactaggtcagatgaaccgaagacctaaatttgactaagccattgaaatgcttacttggacacttcattaacagtaaaacactcaattgttttcttataaaaacagaagactccatctaaagaattccaggatcttttgcaaatggtaccccaaatgacaatattgccttatcatctattcctgaatgcacctgtcctgctgtcttactcctttgctaattgcaaacacagacattttaacaagttacatgcttacctaccatgtggatagtctattccaaggaggtacagaatggccttgggttccaaaggtgttttaaagatgttaggatgttcatccctgcgacgttgttataatgaatctgctaattttcttagataccacaggtacttggtggcatatctgttatggggggcagatacttagctactcaggtccctaaggcacaggcttcataagaattattctgcttttttgaggcctattcttgcaattaggtgcagttagcacctctattctagttttggaatttgcctaaattgtcaatagttttggaatttgcctaaaatttctatttgcctaaaattccaattgtttttcagctctttgacaacaattaaggtcaaggtcaagtgtttcaatgggcttcaactatgagcttattggattagtgatcagaaaatctgattatagctactacttagccttaagatcttgcttagatgtatcaaatgagatagtttatttttctgtaagtcagtgagaaaatgttgtaaaacacttttttttaatttatggttcaatatgaatgccagacttatatctgttttctactcagcatcttctcttggctaataagcttgtccaacttaccctgtctaaaatccaattccctccctcctctaccaaaaacaccaaacgctcattcctagtcctcttcttctcaataaaatacagatgtgtttttctaattatttgctcagataaaaaatcagggagtccttcttaatgccttttccattttccatatcccacatccagtctgtcaccatatatatgctcttggttgtatctgcaaaacacatccagaatctagccacctctcctacctccactgccactgccctgttcaagccatgattgtttcttgcctgaactattgcagtggtctcctaactggtcactctgtgcttccgcccttatcctctttaatccattctcagcacagcagccaaactgacgatgtcacccctctgctccaggtcctcccacggctcctcccatctcactgtgaacacagcacagctggacataactaccaacatggcgcctgtttactttctgctgcactcataggtatttatgccatctatgatggcagtgactttgattcactcctgtgctgctgtgtccataacatttgttaacacacagtagaaactcaggaaacatttgaatgtttgaatgagtgaaagaaagaaagaggatctctctctgcactttcatttctcccaactgcttaacagggaaatgtttccagtggtttattttataaacatattgatttaaatatgaaagcaatgcatttccattgtgaatatcacagaagtatggaaaataaagctgtttccctcccagtgcctctacctagaggtcactactttgtcctcctgaagcctttttctagagctataaatggcttatctcaatagtcttgtttgcaaaattaggatcattccatataaattattctacaatatgctttcccccaccccattctgcatttttttttctggggacttttccatttcagtacatccaaaatgctttgtaactcacattttgtaagggatcctacaggcaggttggttagagagaagtactttgcaaataaaatgtgattttaattattattttgatgattattacccctacaggctcattaaatgaggtttctaggatttctggtgtctaaccctgctttgacagagcctaaggtatttgttacatctgttatattaagaaataaaccttaaatctcatgatgactcacaaaagacactatactctcacaaggaaaaaatatttctttgaaccctaaccctatgaggaaggtacaagattcagtattttacaagtagaataattaagcattgattgatttgctgagcttaccatagctagggagttatctcctcaaatgctggttttctgacaccttctgtgttagcgattgttgtatgagcggctgatgtgttaatttagttatagactaacttcatcctttgcttttgtaacttctcactccttatttttaaccttttcagtgggttctgccagttccagaagatttatcagtttttaaagaaacatcacattttggttcaagttctctctctaaaaacctttgtcatcatttagcacattacaaatagtggcatgtagtcccaggctgcatgtcaaaggtaattaaatctcaggagttggtcaggattcataaactgcttaagctccatgcctgctcttcacagatgtggcatgactttgtgattaaattccagtttggtattcagtctgggaccacttatgcttttgcttgtataaagtggtatatgttttcaataaagattagcggaactatgtaagaaatggaagcaaccaaagcctcttaaaaaaaaaaaagaaagaaaggtaaatattggattctttcctcccctgatcaccctcctacccaactcccattttcctcaagttcaaatgcaaggagagaaccctagcagtaaatgcatgtaaattacgcaaatgatagagtctggggaagcttcaagagggtgaaaaactgccagaacttttcagggtggttcagcacgtttgcttagaagagattcatttccatcattcccaggatcctctggagttccttgttcaaaaaagaaaggaggctgggcatggtggctcatgcctgtaatcccagcactttgggaggccaaggcaggcagactgcctgaggtcaggggttcaagaccaatgtggccaacatggtgaaaccccatttctactaaaaatacaaaaattagcatggtggcacacacctataatcccagctatttgggaggctgaggcaggagaatcacttgaatcccggagacggaggttgcagtgagccgagatcgcaccactgcactccagcctgggctacaagtgcaaaactctgtctcaaaaaaagaaaaaagaaagggaaagctttccacagtggttcgtaagggtgtctttttctctttttgttgcattgacattgcactttgggaaaaccacattgtagtgtaggtggtctgtaaacagtcagactccctttcccaaagctccccattccctccatgtctgatctagtactgttgtagtggtctggcttcatgtgatgacttcagcatatttaggtggtgtcaacatatttctactttctcccttggtccctgttggatgaaagtggatcaatttgcttgttaaacccaacgctcaccctgcatttgccttagagttgttctgactacaagtaaaaagggaaaggatgaactggatgacgtatggacagaaaaaccactgttggttaaacattcccctgcttgaacacccagacgagaacccgtttcttaagagaactacagccttatctattactgtttgctaagttctctatgattgttttctccatgtgagaaataactttataggttagaaaactaagagcccaacagcttaagaaaagaaaagaaccaaccaaccaacccagaaaaagcaagctctctttgccctttgatggactctatcaagtcttgagtgcccttcctagttcctgggaatatactaacagataacagcaggttagagcctggagaggtttcaaagtcatcatttcaagagaaaactgaggctttaactggtttgcatagggtgacaaggctggttaatggtgaacagagaccatgttaataactgagtctgctccagtatgcctctccctacttatggcaaccccaaatcctgtatttctcaaggagattttgatttcaagcattctaccctttccactgtcaagagtatttgcatctgacagttgccccaccccaacttggggcttagccggagttatggtcacgccaactgcatatcattgagcatctgagttgaccatctgtctctgctaagagctgactcttccatttcctttttaagacctgacttgagagagtcaatacctcaggcattgtagaaattgcggtcattctaaaatataaaagtgtaaagtttatattaatatttaattcatacaattggaaagaactttaaactgcaattaggtgtcagtacccatctgcttccagcaggctcacacgctcttcgatccctcggaggccgcagagggccacgatcaccttcgaatgtgctccttaacaatgtgcccacagtctctcaggagggagctccagatggtgaaggaaactctgcaggccatgatcctgcagctccagccagcaaaggaggcgggagaaagagaagctgcagcttcctgcatgacagctggtgtccacgaagcacaagcctgaggagtgacgggatgggggagggaggtgggccaccatgtttggacccggggggctgctcttccctcccccgccatagctaagatgcctgaatcaattacggagatacagagccttgaggtctttcagtggaaaggtggttcatgttcattctcatcagtgtgaaactgaggagtctgcaatttggaatatggagagagagactgatttgctgaatttccttctaaatgtcactcaaaaatttcttttccatgtcattcttgggaatgtcttccacaggatttgagaatagtttcatctcagcccccattagagagaagttggggtgaattctggaaaaatgtctctttttcctgtgccatttgccttctgctgcaacgaaaatatttcctgattcaagattctataaaaaggaaaccaagcataagactctgtcatcatacctgttacacgttcctacaggtgcacaatctaagagagctaattaacctcagagtctggagttaacagcttttcaccttacttctcctgtgatctaatattatcttagaaaaattaatatgcaatttccaaaagatattttggtaagacaacaacctcccagtgatatgccacctttcaattttccttttgtggcaatgattgcatctgaagaaaggatccctgagagtctctgtttcatcaggacattctgaaatttacccacagtgaggctgtggatggatcaggggacctgtataaaatgtttgagcctgttccattttcccgtggaacctgtttcactcaatgccaggcagtgcagcatttaggaaagcagtgcagtactcagtaaggcagtgcagtactcagtaacacaatacagtactcaggcagtgcagtactcagtaagacagtgcagtgctcagtaaggcagtgcaatactcagtaacagtgtagtactcagtaacagtgaagtactcagtaatacagtacagtattcagtaaggcagtgaagtactcagtaatacaatacagtactcagttaggcagtgcagtactcaggaatgcagcacagtactcaggcagtgcaatactcagtgcggtactcagtaacacagtgcagtactcagtaacagtgcagtactcagtaacagtgcagtactcagtaaggcagtgcagtactcagtaacacagtgcagtactcagtaatacagtacagtactcagtaaggcagtatggtactcagtaaagcaatgcaatgctcagtaacacagtgcagtgctcaataaggcagtgcagtgctcagtaaggcagtgaattgcttagtaacacagtgtagtgctcagtaggacagcatagtactcagtaacacagggcagctagtactcagtactataagtactgagtacttatataggcaatgtagtactcagtaaatcagtgcagtactcagtaatgcaagggcatttcaggctcctgctgggctgcttctttggcccagctgggactcctattgagacagctgcaaaacaggctgatttcaattaggcagcacttcccaaagtgcactgaggaaggtggccccaagagaagctctctaaacaaaggagtaccctctctggtcaagtacctttggtaaatacaccataccataatatctgcttggagaaccacaatgcacattagcatattagtctgagagagaacttatagtaaggaaactcacttgattttatctaacctcaaactttccaagtttaatggatcgtgaatttttttcatgtaactcctattcatatcccatagatctagtattgtacagcactgcattctctgaggaagtcccagtccaaactctgatttacatcactttagaaaccacactcacacttttgcagagtgttgagcttaataactacctgccacagattggtaaatttaatccagtggttgttctgtttgtgcttctgttctcatttatgtgtttagggatagtgaggttcctgccttcactaggatccacggatatgagaccatttttgtcatttcctgaagtcacactggcgtttccagaaggcatctggtgctttgctcagccttccatgctgtgcagcacttctgtcctcagtcaaggagatggccatgcttaagccagcaattggctggggtccaggaaacaaagcaaaagcacaatatgtgaatgtgctgattgtgttccctatggctttatctcgagcaaaatacactctacatattttaataataagtataattagcttgttcctggacttcattttcaatgatgaaccaaattcctgaattatttataattgtgtctaaagaaaattatgaactggtcacatggcacttggaatccttgagttaattccagtgaagcaaaacttgggaagagtcaggattggccacattgccaataacaaattcctacttcgacatatgtcttttcaaaaagcctcccagacacaagacatcttaaccgtcactagcccaagtgttttgtattactcagacaccatcatgaaataattctgtgaggtcatgatgtatttgaaaattctgcaagttaataactgccttgaattgtttgaacccgaaataagggttctttggtacctctagtagatagtgtgttcatttccctgctgcaaattttgaagtatttgggcaggtgagtcatgttttaaccacaagccataactcatctgttgtctttgcttggtcttagagtatcattcagaaagtccgctaagggccagcgtgcttcttctggctacacaaccttctcaggacaagcccactgtcttaagccactttgaccctgggagacacaggactgtgtatcctcaatcatactatacagcagtttttgtcaggggaacataaaaatatccaagagaggttagggcttagatttaaaagcatcaaaacaacaacaatggaaatttatgttggcgatagccaagaccacaagcaaaagcacatactggaaatgatgagttagaatctgatttgactgggatgttttatgagaatgtaagtgtgatattatactgtctgccttgctggaatgctggctttcaaatggtcacccatttttctttcactggcctgagttaggacatgctatcagtaatagtcccagttccatccaactttctgaaatttcatttttttttttgagatggagtctctctctgtcacccaagttggagtgcagtggccccgcaatctcggctcactgcaacctctacctcccaggttcaagctattctactgcctcagcctcccaagtagctggggttacaggcatttgccaccgggccctgatgatttttgtatttttagtagagacagggcttcaccatgttggctaggagggtctcaaactcctgacctcaggcgatccacccccacctcggcttcccaaagtgctgagattacaggtgtgagccaccgcacccggccaactttctgaaatttcaaaactgaattgatccttctccaaattagtatatactattggaaacttgtctttccctgcagtaaggctggtttccccaccccagaaacatgtaacggttggtaccatgctaagcccttgccatgctaagccctttacagtcatatcctataatccccatatcaaccttataaggaaggtgtttgtagatgatgcaactgagccttaagaggactaattccctttttctaaggcacagagctggtaaaatgtgaagtaatagtgaacctaacagtcagagacaggcagcatgctcttaactagtgctcttcctaaagttcctttaatgtccttttgagattttgagccatggaacttacttgttcacctggctaagaactcatggccactgtggaaatcttggttagggagtcaaagaaactgagcctggggcaaacgaggcttcccacactgccaggggagcctcactgtgaagtctaggctcagacaggcatcaacaaacctattcaccccaccatcatcctgatctaaccattccccagtcatcccaggaaaaccactcacagcctgacactgggctgactttcttgaagatcctcatccaattggtgtttttcagaagtgttccaatattatgaattctgtgttgtggagaaaagcaaccatgcatttactggtcaatgccttcttgtatatgtaattcaatacttttacttttaatatcctcaccttatctaatctttgaattttgtcatgtaatttattgcttcattaaggttactttttgttatacaaaataaaagctgatatccaaggcatggtgcatcttgatgattttttgtcctttgaagtatggatgatagaaaaatgtatcaggtttattcatctcatctttctgttacaggatgattaattgtacagttacatcacacgaaacatttataataaagtcatgctttagaattgcacgtgtttactttcagatatcagcaaatcagaaaatcatgaaatattctattcccagactcctagattaaggaaattgaaactaacattaccactagagttgggaacaagacaaagatacccacaataccactgaaaatattttactggagatgctggctaatttagttaggcaagaaaaatatagaagggttacaatttggaaaagaaaaaataaagctttaatattcacagatgatgttattgtaagctgaaaacccaaaagaatcaacagaaaaacgtttacacaattaacacaatcaaaatcaacaggcttcatatatgcagacaataattggaagactgagtataagaaaagaccccattttcaatagcaacaaaaagcaagagaaaatggctaagaatatatttatataagaaatgcataagccttagatgaaggaaattttaagatgaaggacatgagacaagaattgaatacatggaaagacacattaagcttttggataggaaggcatcataaatttaaaaatttccatcagtcaatttataaatatttcctgatcccaaatgggacaatagatgtctagttagcccccatatgcattctcccattcatccttttagccgttctgggtctagacacttaaactgcagaggtacatgtgtgcagaattgcaggtgtacatttgtagcattgtttgtaaggacaaaaatgagaacaaccgacattttcatttgcatcagttggagactggttaaataaattattgtacattcacactatggaatgctttacagttgctaaaaaaaaatctttgtgtacatatgtgcttgtctctgcagagctatcactggaaagggatccaggcgacttagtggaaaaaaaatgggaaggagacttacttttctgctctatactattcttttaaacatttggtaccgtgtgcatatatttacctattcaaaaataaaatcatttctttaagaaaaaagtcataattaatgagcctgagagtaggccctcaagtagggcagggcacacaggctgttgaatggttgcccaggtctccttgcggcttatgcaggattcatctgctatttatttacctactgtgtgcccagcactgtgctagggtatgcacctgatattggtgataaaaaggcaagtatgaactatgacataatgtgatcagatgattttaagttgagaaggaaattgatatggttaagctttgtgtccccacccaaatcttatcttgaattacaatcctcataacccccataatctccgtgtgtcaagggaaagaccaggtggaggtaattgattcatgggggcagtttccccagtgctgttctcatgatagtgagtgagttctgataacatttgatggttttataaggggctcttcccccttcactcagcacttctccttcctgccgccttttgaagaaggtgccttgcttcccctttgccttccgccattattgtaagttt

SEQ ID NO: 643 - DNA, 71353 bp, Homo sapiens
  source 1..71353: mol_type = genomic DNA
agacaaacactcactatctgctgaatgaatggacaggttcccagggagtttccagagctgcctgggctgtcacagacaggttgcatccctcttaattaaacaaacaaataaaattagccaggcaccgtggctcatgcgtgtaattccagcactctgggaggcagaggcggaaggattgcttaagcccaggaatttaagaccatcactggcaacacagcaagatctcgtctctacaaaaaaaaaaaaaaaaaaattagctaggtgtggtggcctgcacctgtggtcccagctacttggggaagctgaggcgggaggtcgaggctgcagtgagccatggtcatgccactgcactccagcctgggtgacaaagcgataccttagctcaaaaaacaacccaaacaaacctgggaatggactgaacagtctccatttcaagatttcctccttccattggaattaacctgttggttgcttgtactggcatgtggcaaccagtcttagcccagttttaatagatccctgtttggtgttactcaacagagaagaccactcggccctcagccaccgaataagtttaagaaacagaggtgtggcatgcttcattctacaggtagggaggctgaggctggggagccgcccctggctatccctggaaacccctctaccccacaggaatcgtcccagccatctctttagcgtaaaggtgaggaacaaatctcagccacgatccaaagaggggcgccacccctggctgtccctggaaacccccctacaccacaagaatcgtcccagccacctctttagcgtaaaggttaggaagaaatctcagccacgatccaaagaaagcttggtatttttagcaccaaggccagaaggagcgtgtccttactccttggtttacaaagaaataaaaaccttttccccatccttcttttgattgaagactacccccgcccccaggctccaaagccgggcaggaacgcctcttatctccaccacagccattttcctaatccttcgcccgctctccacggtcatcccgtgtatccctcgagacgccgcctcccacagctcgtgcttctcccaggttcggctccgacaaggccagagcggcgtctgcgcagcgcaacggctcagagcgctcccggcggctacaagtgcccggccccgggccaggcccggcctgcgccgcgcacccactgggagggcgcggaccggggccgccccaagcctccggcaccgcccagagcgggacaaaggggcgggccggcgacccggcctcgcggtccccggtgccgcgcgggccgggaggcggggtgcggtgggggaggggcgaggcggctgggggaggggcggggccagggcgggcccaggcgcccggggccgcaccgggcggcgcagggaagcggcgccccttcctcggcagacggcaggcgccgcgcctccggccccgcccctccgcgcccctccgcgccccgcccccgccgctcggacggcccgagtcgcgccctcccgccccgcgccgcggaacttgctctaacttcctcggccgagccgggccgcgccgccgctgccgccgccgcgcgcgggtgagtagagcgcggagacctggctggggcgtcgggccctgcccctttctttgtctgaggccgacttccccgagcgttctccgggggcgagggctgctccttaggtccctgtttggcccctcagcctccctccccgcctgcccaggagcggccccgcgggcggcgctggctttgtctgccaggattgctcgctagaggttggaggcctccgccgggaccccgctgagccgaactccggcgccgcgcggacgagagccgcggcgggcccggggccggcactcctggttcggtagccctcgccccatcagcgcgccccggcgagtgcgcgcccgtgccgggcggggtgagggcgacgggagcctggacggccgctgctgctcggggctctgcttctcgtccccagcagcgagctcggggatgggccaccctttcggctcagtcacccaccctcggctcccaggagatcgggtccggggtgggggtgggcgtaggccggggcgggccgccccttcctcctgccccgccgtggttgtgctcagtctcccacgccgccgtgggtcccactctgcccggcttgggtttgggacggccggagtttgagtaggcggtgacccagcttctccgcgttagtcgtgtggggttgtgtttgggagcaaagcctgacccctgacctagccggagttctggtagagtgaggtttgtggctgcggactgtgcttgtcccgggccgctgctgcttctcctccacccccaggggtggggtgcgggtgggtaggaagtgcctgtgtgagggtgtgtggagggactttggccctgggaccgcaggagcacttgtcttggggacttaaagttgatctccggcgagaaacagtccgtgctagggggagtcgggggaagtcgtgggcccgggtactggcctggggctgggcgcagagcggtggtgagtgcggcggtgtcacacactcgttggctgtgctggcgctgctatccgggaggtcaggcggtgctgggcggctgtgcagagcattgtattggagcctctgcaggtgtgctcttggcagtggtctgctctccaggggatcttcctcccttccgagagggagttgctcttgggctagtgagagagtggcctgccaaatcctcaaaagtagccttccccttgccccttgaccttgaagtccagaagcagttagtgcctgctgagtgctccggccacccttctctatttgtgaagggaaacctggggacaggccatcggagcacccctatgtccttgccacatttcagctagccgagtggttggtgggggcggccgtctttccagggatcttcctgggccctggcacccccagaatgaagcccagactccaccataatggccctgtatgcccttctatccccttagctgctggtgtgatcatagcctcaaattgctgggctcaagtgatcctcccacctcagcctcccaaagcacagggattacaggtgtgagccaccacgcgcagtctgatcccactccgatccctaacgttatagtgacaggccctggaaacccagggccaccagatgtattttccctttccttctcattgtgttgcaccccaacttcagttggagactctggatatatccatccccacatctctgaactccactgcttgggccacctaatgtcatcctcagtttagttaacaaagcatggttgagatttctgtggggtgcgaggcattgttgcaggcactattccaagtctggaaagtccctcaccagctatgaacttggtgtggtcttagaacccaggctggacatggcataggtgctcagtagtgtttattgatctgagcttgatctcagcgtagcaggatcatttagggagacggggttgtggggggggtctgagcccatgggtgcttctgaaggtttgtggctgccccaggaagaaagggcatggagctgcagaatggttggctgcccagggaattgtccccttcaccagctgggcagctgtgctagtctctgaggactggtgaaggtccttctcatgtaggaagtggcagtatgaagtgggagaggagatggctctgccctgaaggttgtggcggcagtgaagtgaagttcccatggaggccggggagcaggaaagccctgggttctggaactatttcctgaggcctcactctatgccaccatgtgctcaggaatttgacccatttaacttcaactgaggtagaattccttttagcagtgcctgcaaagtggcattgtgccaggcctgggaaacctttgctggcttaaaatttagtgaaggacaagattatttcatagtgatactaatgtgagtttattgagacttacaccctagaagtttgacttgtaataactcatttaatccttgaaaacagctgtgatggctgggcgtgatggctcatgcctgtaatcccagcactttgggaggccgaggtgggtggatcacctgaggtcaggagttcaagaccagcctgaccaacacggtgaaaccctgtctctacgaaaaatacaaaattagctgggcgtggtggcacatgcctataatcccagctacttgggaggctgaggcaggagaattgcttcaatctgggaggtggaggttgcagtgagctgagatcgcgccgttgcactccagcctgggcaacaagaatgagactccatctcaaaaaacaaaaaacaaaaagcaaaacaaccgtgatgtcaacagctccattttacagatgaggaaactgtggtcccgagaggtcacagagtaacttgcttgaagtctcaatatgagctgggttttctcatttctttttttttgatactgagtctcactctattgcccaggctggagtgcagtggcgtgatctcggctcactgcaacctccgcctcctgggttcaagtgattcttctcctgcctcagcctcccaagtagcttggactacaggtgtgcaccaccacacccagctaatttttgtatttttagtagagatggggtttcaccatgttggccaggctggtcttgaactcctgacctcaagtgatccgcccgcctcggcctcccaaagtgctgggattacaggcgtgagccactgtgccggaccaggttttctcatttctaatttagacaatatgttcctctcagaggtgattaaaatggattcatataccaaacaagcctggcccacagtggaactaatgaatgttttcagtgaaggtgcccttgtatccctgcctctgaacacatctcatctgtccagcacagcctgggcacatagcaggtaccccggaacccccgctgattggtgatggagcttctgtctccctaaggccagggaatgggaagaccagcactaccacatgcagaagattggggagtcactgcttgtgtctgtctggacagatcacggtttgctgtggtaacagcaatccccaggtctcagaggcttaaagcaacagaggtttatttcttgttcacactgcatgttcatcacttatctgctttatgttgtcctcactggggggacccatagtgattagtgggaacacccctggtggcttggacagagggacagagaacatgatgatccctgtgtcctgccactgagtcctggtggcctttaagatgcctatgggaaggggattaggttcctgctgcctgtctctgccctgccgtgtcagtccttggatatcttgcatgttccatccgctacctggatgtggcctgtaggggcagccacctttcctagaagcaggagcaggtagcgatacccaggcaggcctggtcctccccacttttgtgggactcggggattgagcttgcaggcataggggtgtagaaagcagtggtagcgaggtgactgaaggtggactcccactggggatgggattgagtgtggggctagatccctggtctgtagaagggagtaggaaccctgttagttaaattttccccctcaggccacgttagtaggattttgaagagtcagccacactgtggctcttgattttgtgcctggtcacctgcttggtctctggtgatttccctcggggccagcagacactgttggaggtggtgaggcctcaggttcttctgcttcatggttaactcactctgcttaggcatatttccaccttttccagggcctccgtttttctgccagtggattgagaggtggtggtggtctccagcagtggtctcactcttggcaggctatcagagtacccagggagctgcgtagaatgaagttttgagagtctttggtctaggtgaatgccagcgtttcagtttgcttatcttccattatagtagtgtcctctgtaactgtgaatcagggaggttattcataatatctccacatccattttctcccttaattgcgtatgcttttgatttagacagggcaagtagccattttggtggagcgcaggccctggcaggggggcagtgtccagtgccgctctcaattaaacgtgaagatgtgaagatgaataacactgtccagcttgcagagtggacggtggtgaggcaagctttcaagttgcacctactttctagttgagtgacctacacaagtctttgattttttttttttttcttcctggaaaaaaaaagttgtctacttttctcatctgtaaagtgagaagaatcaagtctgccttttctgtctcacggggttgcagtgaagcattagtaccctgagaagcaagatccaaagcccctgagttaggcctgacactggtgtgagacagctgccatctctggcggcactcagcaagtgttcaccagcagctgattctgggaacctcacttcctccgcccttgggcttggtggggttgggtagggttgggtggggctgtggttttcttttaggaggcagcaggccaggcctggagaccagagcttaagtgggcctgggcaggctggggttgaaactcttcaccccttgcggtctgtactgcctcccaactgagcagccagggagaaggcctagagcctgtgcctttcagctagatagctggaggaactggctcctccctccttaggctgtgctggcctgagctgggagcctgagagctggggcagttgtctctaaagtggcttctgggattctggtaagaggtgagctcctggtgctgcctcagagtctttgtgtttcctggcatttgggagagctggagttgggctgtcctgcatgggtaaggtttggggagggactggaacaaggggctagtgaaccttctctgggtttttcctgcctgactatgcgttgacagtcccagctgttgggcctgtgctcctgtacactgcacggccttgagaggagttcggagccctaacatccaggagagaggccccacagcagtggaaggaaatgggcctctcccgaatctcttgtttgtaccccgaggtctgagtggtgatcctggggatgctatgggactctcagcagtaggagtgtgtctgtccccagtctgggtgcccaccagctgtgctgagggtcctctcctgtgtccctgggccaggcagacagggtctttttctggggcttgttaggggaggtcagccacagccccagaccaagtaatttacacaccctgagtgaggggtgggagcagtgggtccaggaagacttagggagctggtgaaagaaaaacttaattctgacacttgttaaactggtaaggtagactgtatcaggactattacgatagatgtaggaattatcgcaatggattttgcagtagaggggagagagtgggccaactccaaatacaacaaagaaaagtgggaacttatagccaaggagcggagtgtgggggctcctgaaaatttctaagagggtagggaaatttttactaaacttagctaactgaattcttgctgcaggcaggccagggtgatcaggttttacctgggagatagtacaggatgagaaatacgttcagatatccagggtgattagatattgaggttgggggattctggttaacaggagttttgctaaaactaggctcttagagagaatggagttaggaaccctaggtcaggaccagatgagtagagggctcagaggaataaagtttggtgagggacagaatctctgtcagtatcccgtggttggcagtgtcctgtccattcttcttgcactggcctgtccctcaggagacaggtgtgagtggtcctgagcttgggccagtgtaagagtaggggacaggtttctctccttgtaggtgtcccttcttgtaagtgtcactctctttttttccagaaaccttggtccttttcagcatctgctggccccttgtcccttggctcccttgctcttggcctgctggatttcccctctgcacccaggaaatcgcatggacctgggtccttgtttccctacagcccaccaattttgctgcttttttctgccccctgaagctgagctcctgctgcaatttgtgttccctgctctccctgtcctgggcaaaccagtctgacaactttgtggttctcgctcccgcctccatcagcctggggattgactgtcccatttgtctgagctgggcagagggaggtgctgtgggggatctcttcctcttgcctggactgcacactcctgctgccttctagccggagctcctgggcattttgcctatgggagcttcaccagcttccttctgtctgaggcctacaagtccctgcctccagcctaccttgttcctcctccatgagtgaggctcctccttttctctctggccctcctgtctacttgatcagactctgcctctcttgagggccggctccctccagcctaccctgcacaggtgaccctgtttggcctgcctccttttcttgaggctgatcttgtctcaacagtcagcttttcaggaaccaggcccttgctgttgtaaggaaaacctgtcggctgtggatggggccttccctccttcctaaaggctctgtagccagcttccacccttgcagtggaacagtggtggtgccagaaccctgctctctgcagccatcctgcctaccacagtcattgtgttttgtaactctagtagcttcttgtgaaatacaagtgatggtataaacgtggataggtttttgaggggggcatgccaaaatcagagttggtggtagtggtgggggattcattcccaagggctctggggtgctaagtgtgtgagcaaagaggaacaagtggcatgtgcccaggatggggtggggcgggcaggtttagttgagggctcctctggtgtagggtagccctgacgctcccctccatggcatgactgatgaggtggcaaaggcaggtgccaggatttggtgtgttgaagattagtgcctgggttgggctctgctcactcctgcagaaagacggttggagaggggctggtcttggtttcacagaggattgtgggattacaggcaagacctgctgagggcttgcactgagccaccgagaggagcagaaagagatacgagggcttcaggtgccagtatggttctcactgttgtgagatctcatttgtgccttttttttttttccttcagacagggtctcactctgttgcccaggctggagtgcagtggccctatcacagctcactgaggcctccaccttcctggctcaagtgatcctcccgcctcagcctcctgagtagcagggaccacaggcatgcagcaccacacccagctaatttaaagaattttttgtagagattggatcttgctatgttgcctaggctggtgtcaaactcctgggcacttgatttgtgcttcttaattcaggggctacttattgaacatatttagcagtcttcagaaagcatcttattctgtaaggggaaccaaatatacccattccccctctctggccttctttccctgtggtctgggcggtctttgagcttgaggtcattaggaggtgtttatttctgtccgccctggtggcctagggcgtaggaatggggtgggatgggatgggatggggtggggtggggtggaggagttattctacatagatagagttctgtttatgcagcactccctgccatacacatctctcactcaaatggtctggccagtcctggttctaatggtcattgtgtcattcccctcagcagcaggaaaggctggaatggtttttgtattgttccttagggggaaaaatcacttggaggaagtatatcagtgcttctgagtgcagagtatttattgacacgtcagttaaaggaagcttttaaacaacatatatgtatctctttagtgaggaataaatctacaagtgcatctcacagctccattttgcagcttccatttcctggaaggtacatggagtttagtggttagggaatggggttttgagctgggattttggagaaactgtttttagcctgtccttggaattgggccaggcctagaaatctgttgaaatagctttctttagttgctgaaactgggatgtgttcatagcactaggacctcgagctccactgatgactgagtggggagggctcagagaagggtccctgtggatgcccgggatgcctgggtttcagtcccgtctcctgcatcgcctacattgcctgaatcttagggtcttacagatttatcatgaagtgggcttggcagcagatggtctggtttcttttgtgcctttgtcagaatctgttcttgctcttcttaggaaaactttctatttcaggacttggggtggagtcgaaagcagggagccctgtgagttggtgagtctgtatccctgaggctgccactgcctgaccccctccttccccttgtttcgtttcccctccccattactctgccttgttctagggaaacaccagaagctgcctgcagacagctacgggtaaaattgtgtgtccagccacaaactttaggcattttaaatattaatttaggtttaacatttttatttacaaaaatgtatacatgatgaaaaacacataacaaagatacacggtgaaaactcctatttctatccctgaccccttcagttctgctcccctgaggccgctgtcaccagatgttcagtgcctagtcaagcatgactgtattcctctcttgtttattaccccagtggtatactaattatgctgttttgcacttcctgatttttactctgagaatttatcccaggattgttccattttagcacacatagtttagtccattctttttaacagcagtgcatgattctgctgcacagtgaatgatgactcactttaccagctctctattgatggattttgaggttgctttcagtgttttgtttctataggctaagctgcaggagtgtcttatgcatgctgcaggtctgtagtggaaatgactagatgtggagttactgcattaggtgtgtaaaaggaaaagaaacatgcggctttgattccgaaagggggaatgaaagtttacaaagttttcttttggagggatcttggccttctacagagacaagagctggagaaactactgggaaggcatgagaggtgccagcgtgttggttcccacccaagtccatctttggttcagttcaggccagcctgtctccgtgacctccatatttacagcccttggctggccctctggctcatgcagcctgtgcccctaaaagtgtgaggagtcagccagagcgagttggggtgtagggaggcggggagcaggcttctcatagtgggttccagcaacctcacgactttgcaggacctatgtggggtgtgaagggggagcgttggttgcagcaagctggagctggcgtcagcttttagaggagcagattttcccgcagtgtcaggggttggtgtgaggatcggcctccttctctggcctcccttggcctttcgctgctctgcacacctccctgttcaggccgccttgggcctggttgccaccctgtgattttaaaagcctgtgtaaaaggcacctggtgaaaataatagatgggttttgtgttttgagcgggagcttcctttcagaacagaaatggggtacggttcttcctgggatgggtggggaaggagggacagtcgtgagagcatgttggaggtgcccactctgtgttgggagctctctggttgtttccctgtgtggctttcactgccccatgccagggcagggtgggaagcagggagactttagggctggctggcagatagacctcctaaatagaccctgacctggtgggtttgaggcttgtgtccctgccatggctctcccacccttctactcagagaacttctcaccattgcggttacatgcagtccccgtgagaaggccagagcttcccatgtgcagctcattgtctgggcctgggtccttggtagcacagaggtttctattgtggcctggtggcagtgagggctgacctgtggagctgaggaggcgggacctggggcctcacagtggagctattcaggggctctgccctggtttcctgctgcttcccattgtagatttttttgggggaagggtgggagggaactagagaaggaggagagtgggagagggagtggtcagtgcaactattgttgctggtagcaggagccctttatgcttaatagaggtccatttgcagacagccttgagccactccaaggcccatcatgtgttctcagattctagtttctgcctctgtcaagatcccccttcgcccttctcaagtccctgtgcttgcctggaacacctctgggtaagagttctgagcagctgggcaaggagcaggagtggccggtgccaggcttgtcggccacctgcccactgctttggggagtgagttctgccgagtcttcccggcccagctgtgcccttgggtgggggccaggcacgtgcctgggttgctattagtctcccaggccccccacttgctttgtgcctcagtgctcagcccagtgctcccgttcctcacgcgagcactcagctgctgaaaagcctgtgtgctggcagctcagcctgcagccacccccgctgcaggagccacagccattttcctttgttctgccatctccgggctcttgaatctcaggctggcagtgggcagcaggcagccagcacacagcgctggtggggtggaaacccttgtgacatgaatctgcccactgagccaaaggcatggcagccccctggctgcacccctaattcctctggctgtacccctatctcccagccatgctgagagaagcacagagtatcccctcttactggatcagaaagatagtgacacctacagtgggaacagagagaggtctcacctgttttgggccactgaggtgcacactaaagagagagagagttagcctccgggtctttggcagaaaaagccactctcaggcacaaaggatgctcgttcttaatctcctggtctttgttgaaaacagaggcaggattggttaagaatattttttattttggtccttatggttgtgaggacctttctctaactgaggggaactgtaccctgcttcttcacatctgaatctctcccttctctcccccaccactttttggtgggcaaaatgagcattctcttttggggtacaatttcagctatgtgtggggttgcaggcggggtgaaggccactctcacccgctgtctgacttctctatctgaggtgtgcccgccccaacccatactgtctcctttctaaaccacagacagaatctgtaaggcacctgcctttgaaatagagttgttttgtatagaactcataactcccactagttttcatgtgtttagcattatagcttaccctttcaaaacccatcctggctgtcttatttgattctcttatcagccaagtcttacaaatcaagaagcaagcctcagccccagatagggttgcaccttggagtgtcctcattttattttattttttgacatggaatcttgctctgttgcccaggctggagtgtagtggcatgaatatggtttagtgtagcccccacctcccaggctcaagtgatcctcctgcctcagctttcccagtagctgaaaccacaggcacgcatcaccatgcgcgactaatttttaaaaatttttcatagagacgaactcttgcaatgttgccttggctggtctcgaactcatcttctgggttcaagctgtccgtctgcctcggactcccaaagtgctaggattacaggtgtgagccacagcacccagccctcattttaacaaatgttgtagcacctacaagactcaaagtaaaaagagctggtgctcatcgtgaaaggcattgaaacacccccactttggtggggggtggggtatgttaacagaaaaaccaaagtctctaaaatattttaaagaggtttattccaatccagtgagtgtctgcgtcctgggaaaagcacggtctcaagaggtgtggggaaagggtgcttgaggccgttggattacggttttgttttatacattttaaggaggcaaaagttacaggcaaaggcataagtcagtacatggaagatatgcattgtttaagcccagaagggtgggatatcatgaaacgggcttacaggtcataggtgggttcggagattctttaatttgtaattcgttaaaggagtaaagctttgtccaaaaatttagagtcagcagaaaggactggtaagataaggaagtccgttaaccaatacactgggttagagctgtggggtgagtgacttaacccttgtctggcatggccttcagtcctctttatatttcggtatcttattgtcacaaagagtcttgtttcttagtcttataatctctattttaatattaatgatggtcagtttttgtgtctaaatcccaaaagggaggaggtatgtaatgaggcctttccaacctcctccttgttgtggccaagagctgtttttcaggtttctctggggtcctcgtggccaagagggtctgtttagttggttatggggcttagaattttatttttagtttacaggttgttggacccaaacaagactgggaaagtcaccatcgaggcagctcagtattctttctgggaaaaacacaatggatgtagaggctgggatttgaattcgggcttactgggtgaccttggtgggtcacttcctggggtgtagattcttactagaaaatggaagtgttgctcagaggaactttgggaacattttagctgtaacccttggagttctattaatctaactccaaaatggttctattaatctaactccactacctggaatctctcttgccaactcaggatcctttggaagaaaatgtcatcagatggaattaacaaagagcccctcttttcctgggcatttcttcctcaggttcttgaggggtggtgatgatcacctcaaaagatgcctgtagttttcaagtggaaaccgagccaccctgagcccaaacacacactcccagtgttcaggcgctgagtgtggcccctggagttcactgatgagtagtcttaccttggacctcgccttggcttttcttggaaatggcacattacttttgtttattagtgtagcccctctgttgtgaagtggaatccagggagagggaagtaaagcttttaattttacctcttgccaaagtgaggccaagctcttaaatgtaaaaacaaacttgttaaaagtaaaaatgaaaacaatatccccattcctcttctttgggggtggagactgtgtttaaattttgcctctattttgtcaacaggttctaggagacaaaatgttcttttcctggtgacctttcaggctgggtttctgccctttatgtgcctttcctggcccagcctccatcctctgggcccgcccacccaaaccagcactgcctaccaggcccccctgtgcctgttgcccgtctgacttcctcccattgtcttcggggccagcctgtgtcactgctctaggctgtgtttctgccggcacgaacacaggagggcggtggtcttggaagaggcaggtctctatcatttggttagagtagcttttacagctgagaaatgggaataaaaataatctgtgaggatccattgggatgcaacaaaatcccaaacaaatcccaaaattaaagcattcctccagggaagctgattgcatccttgtaaatcaggaacaataaagatgggtggctttcttcccatgacttgctttaatggttgttttccttctgtgtgtcagcgttacatccttactattcaaagtgccatccacagacctgctgatgggcagcatgagcatcacctgggagcttgctgcgctgtagaatcttgaggggtctccatccagatcagctgaatcagagtttgcattgttaacaaggtaacccaagtgatttgaatgcttttttaaatttttttttttttttttttgtgagatagggtctgactgtgcgctcagtggtacaattaaggctcactacaccctttatctcctgggttcaagcgatctgccaaagtgctgggattacaggcccaagccaccatgcccggcctgaatgcactttcatgtttgagaagcacagcctcagccagccacactgtcatgcttgccccttcgctttgttagcctgtttcatggttttgcagtctttacccacttgctttcctgtttaaagttgtcgactttaaacaggtttggcagccccagctctcagtccttcccctctgggtgtgcagtgcacagcagttattcctcggtgccggggatgtcttggaaatggagctagttcgagaaagcccccttagcccagagccctgctggtgaggttatctttggggcatgggggtgggggtagggatgggggggtaactggagccctcctgggtgaaagggcagccctaagcctccctggccatctggtgccacttgccctgccctgttccagctggagaacaggttcagaatcaggttgtaaatattgtttgcttttggaagaaacacaaagcattttctataaagatgttttggtgtatgttgaagataaataaatagtccagaagagggactgtaaatttgtattttgtagtagttttgcagcagaaaacagtttgaggtgctctcctgatttcactttacgcctgcacatcccctgcattctggcgaaggttggggctttgtggggaagagcttgcttccctgggaatgagaccctgactctcctgctcagctacccaagggctcccctgcatttctggctctgttttaggggatgatctgctttctcctgactcttgatttcctctcagccttttccagcagtttctcaccattgatttgcagtttaaaaaattctgccgcctcttcctcctctcttttgacattcacaaggacacacttagttttatttttccccactgggcttcacttttcatggcttctttggaaaggatttttgtttgttttgttttagctctgtaaatctttttcccccaggctgggggagccaggccctggggtgggctggaaagtgtcccaccctagactcagaagttttccagattgccgtcctttgaggtgggttttttttgtcttaaaacacagtacagttgtcccttggtgtcctgtctccaagggagattggttttagccccagcacttagtagtgtttgcatataacctatgtacttcctcccatatactttaaatcatctctagattacttataataactaatacaatgtaaatgctatgtaagtattatataatttaaagcatttgtaatttttttttctttttgagacagagtcttgctctgttgcccaggctggagagcaatggtgcgttctcagctcactgaaatctccgcctcccagattcaagcaattctcctgtctcagcctcctgagtagctgagactacaggtgtgcgccaccaggcctgctaatttttctatttttgttagagactgggtttcaccatattggtcaggctggtcttgaacttctgacctcaggtgatccacctgcctcccaaagtgttgggattacaggtgtgaaccgctgcgcccagcctttcctgaatacttttgatcctggttgcttgaatctgaggatgtggaacctgtggatatatggaagactgacagtatattctagctgactgtgcaattttgtataaaaagatttttaagcatcttacagccataatctttatgcctttcaggcgtggaaacatagagaatgaggagtaaatataattctaaactctcttatgtagtttctttgtgacctgtacaaagagaacacttcaaatctacattaggcatgtaggtcaaatccctgcagcctactggagcagctcctgtaacagccagcttttaaagacccagttattggagcaaagtttgtttctccccaagaatgggccactcatcacttggaacatctatggtgttcaggagtggctcccaccccaatggtgtcagccctgcaaggatgaccatgctggttttgtcttggtatcatctgcagggcccagcctggagctggggatgcactgaaggctctgttaataatcttcattggagggtcagtctcggggtgaaacagttgcctgctgccaggtcgggttgcagtgtgtccctccctatctttaggcacagctctcgatcccaaactggggagcttctagatgtgctgccctcatctagtacaaatttaaactagctgctttagggagcatttcctgaccagcttgccaccaccaccacctccttctctctgccctccagcacctacttgactgcacttagtgaagggagtcatgttctgagttccctgagtcaggcacaggtcccactctgagttggtgtttgtctccacggcctcattctcggtgtcttacatgcagcagtgccctgaacatgtagaaacaagtctttaggtgtttgtctcccacagcaaaagtcttttcaccccatgggcttggcaggcgagcctgtgcactgatggattgctgggtggtttgcttcaaccttgctgatctagggaggccacagggcccagcccagtcctcctgaggtctggaggcacagcaccttggactccctgggttcttgttcacattgggaatactagtgtagactgggcccagactctccacgtttgtttgcaactagctgaggaagaggctctgatgtgctcttaccaggggcatataaaaggattctgtgtatagacatttcatgtagacttagattttcagaaacaggcctgtcatgatgatcagggtatgggtataggacacgtgcactatgcctgctttggcctagcatcctcccttgagtgggcagcttcaccttcaatggcagagggaagtaggttgggacatcaacttggaagtcaaggtgccaggcctccttttgcctagccatttgagaagtgggggtggggtgggtagcaggtgtggggtgagtggcaggtgtgggtgaccaggccctgcctcacctaggtgggcaggtgttgccctgaggctgctggtgcagttgaatgagctgcctgatgaatcattctgaaaatctctcatgggtgctgggcgtggtggctcatgcctgtgatcctagcactttgggagcccgaggcagtaggatggcttaagcaggagtttgagaccagcctgggcaacatagggagaccccatctccctatgtagctgggactgcaggtgtgcactgaggtaggaggatcacttgagcccaggaggtcaaggctgcagtgagctgtgacggtgccactgcactccagcctgggtcacagagtgaggccctgtctcaaaaacgtaaaagtgaaaatctccaatggggcccaaggcctgaatgttttgtttgctttttttttgttcctccaagaaggaccacaaactctatgtttcagttacttgaagccagttattttgtagtatctcccttaatttaagtttgtttgttgtttcctcatggttagctgcaagttttgcagttttgtaaggaatactgcggaaatggtgagttctaggtgcatccccttgggaggcacatgatgtgggtctgagtcattaccggtgatattgacaatgatcgcttgcttatggtgatgtctgctgggtttctcccctctaagttactattttgttctttgtaagtgtcctgtggggagatactttgagattatgcaaatacagtatgctatttcacatcaaactcatgactggttttaggacccattgcagattcttggcacagtcggttgtttctgtcatgggtgttgaatgcgatgatttaattccataattccttctacatttatcatttaactatacagaactgctgtagctatgtatcattgtgctacacataacttttccttctttcctgtttatttatctctgtgtgtgtattagaatgggctcatgaattcttattttattcaatgagttaaaatccgttgttattattgtttattttgccgctcagattgttccagatttggccagtgggggctttttcaagctgctgtgaatgacagctcttcaaaacatgcatttccaagtctatcacagttctgttgaactagttgccatatgattctggaggcagctcctgagccgttctgctgtcctgtggagcatggcgtcagtcacagtaggcccatggtttttagtgtgcaccttgtgaagccttcctttcccccagccacctgaagataaaagtgtcctgctctgcctgcttccatgttgggtttctgggtcagagtttctttgaacaaagcctcctgtagcttaaaaaataataaaaatagtaagcttggaagtcactggactaggtgacctccattccaggcccagtgcttctcccactgaggactcccctgactcaaatccacccactctgctgctttcctgatgacagcactgaggtagacagaggcctcctctcaccaggttaatgaggaggcccctcggtgtcctgaaacttggcaggttttgggttgtgagtttttggtggtggaaattcacagtgtttcagtcactaagatcagggtttttacaggatgccaggcactgagaccctcagaccctttggagagcctggtggagctcagagctggggcccagcctctcctgcacctgcatgtggaggccatccagggctggcggtcaggggcttgatggccttggaagctgggggcccaccttccccacactgtgccagggcagtgtttgtcaccctgtgataaaggaggggatccagcccccctgacgttgtgcagctgtgtagtgacttcccacagtaaagagtcaaacttcttcactccagtgagcggttgctgccaccatgatgggttttttttttttttttaaattaaagtttttttttttcttttttgttggaaaccacaggttcacatgccacggtgtctgattttgcagtgtttctggtggcccctggatttggcgtttgggttaatgagggaatgggtcagggatgtgcatggacagttctggctctaaggggtgagtcagagagagccgagcccctccttccatcctcagagggtgagattgctgtgggcagctgagcagcctgccctggcctgccttagtgattctctctcctactggggcccattccctttcatattcgcctgccccctcctaggcttctctccctgggcctgcctgttcctttggcctgtgaatgttcctcagcacctagtgggctctagagacccccttctcagatggtaggaatgtctaggccccaggtgctactagaggtgcagcagaaactccgccttccttgggggatgtggctgcccttccttgggatgggcctgtgatcaggtcagaggccagttctgggagcctcaaaggccaggtggtgttgaaggattggcttcggagaatgagagggaaggagagatagtaaggataatttgggggcatggggtgtatgtagctcaggatatgggtggtgggtgttgtcattgtcacttgggtccttaggaaaaagaggggccagaggaggggtggggttgaaggtagagagccaggtaagagaccttcagaccttccctgagaggtcatgaggaactgacctgtgccctcaggacgggaggggaggggagtgaggggaggggaggtattggagcgtgaggagtttaggaaagctcctgagtgtctgggtgggtgaaggctgagggattctgggtggggccccttggtccatgctttgtctggtatttgtgcctggtgcttgtgtggaaagatgcaaatctctggaaccatcagcagagtagtgttggagggttgtgaggcatgtgattatcccataggaggggcaaacactccagggacatcactctcaggaagcctggggagctcgcagtgcctttgtgcagggtcaggccacatggtttgagcctggccttcccaaatctcagttcacttttctccactgtcatgtcatccggcttccttcccttgggttttctctcccctcttcctccctcatgaccccttattagtatataaaaaatgagactcttgtctcagagcttcccaaattttcatcttattcaggatcttagtgaaatgcagattgaagggaattgagattccacatttccagcaagctcctgaaatgggcatcgtccaaacagggccaggcagaatcgggggatgctaaagaactggaggtagaggacacccagttggaggggtgcaggcggccatcctccccctctgaaggtccctgtgggaggagccaagggcctgacttctttgggtgtggggctgccaagcactggctggagtttaatctggatccaaggctcacaaacagctggttcttaagggagtgtcagtgttgcagtgatgtttgatagagctaatctggcaataggacagataatgagcttttctgtaaatctaaaagttttgggctgagcatgatggcttatgcctataatcccagcactttgggagactgcagagggaggatctcttgagccaggggtttgagattagcctgggcaacatagtgaaaccctatttctacaaaaaattaaaaaattaacttcgtgtggtggtacacacctgtggtcccagctacttgggaggctgaggtaggaggaccatgtgaagctgggagtttaagatcctgtctctaaaaagagaaaaaaagttttaagttaaaggtccactctgttctgagttgatgttctttttctgccccctttccccatccttttttttgttgttgagacagagtctcgctctgttgcccaggctggagtgcagtggcgcgatcttggctcactgcaacttccgcctcctgggttcaagcagttctctgcctcagcctcccaagtagctaggattataggcgcctgccaccacacccagctaatttttgtatttttagtagaggcagggtttcaccatcttggccaggccagtcttggactcctgactttgtgatccacctgcctcggcctcccagagtgctgggattacaggcatgagccgtggtgcccggcctccccatcctttttatacagtcatccctccactgtccaagggggtttggttccaggacataccccctccattatgccaaaatccatagatgctcaagtccctaatataaaatggtgtagtatttgcatataaccttcacacatttttccctaaactttgaaccatctccagattacataaaaatatctaatacaatgtaaaggctggctgggtgcgggggctcacgcttataatacaagcatgttgggaggctgaggcaggcgaattgcttgagcccaggagttcgagtccagcctgggcaacatagtgagaccctgtctcttaaaaaaaatttaaaaatcagttgggcttggtaacacactcctgtagtcccagctacttgagaggctgaggcaggattgcttgagcctgggaggtcaaggctgcagtgagcccagtttgcgccattgcacttgagcctaggcgacagagcaagaccctgtctcaaaaacaaaagtaaatgctgtgaaaatagttgttttactgttttttttttttttttttttttttgagacggagtcttgctctgtcacccaggctggaatgcagtggcgagatctctgctcactgcaagctccgcctcccgggttcacgccattctcctgtctcagcctcccgagtagctgggaatacaggcacccgctaccacacccggctaattttttgtatttttagtagagatggggttttaccatgttagccaagatggtctcgatatcctgacctcgtgatctgcccgcctcggcctcccaaagtgctgggattacaggagttttactgtattttttacttgtatcattttttgttttgttttgtttttttttatatttttcaaatatttttcattcccagttggctgaatccatggatacagaactgtggttgcagaaggctgactgtattaaatctcacaatttctgtaggtcagaggtccaggcccagcatagctcaacttattccctccttagggtctcacaaagcccaaatcaaattgttggcagggctgtgcttctctctggaggctctgggaagaatccacttctaggctcattcaggttttcagcagagtgcagtttcttgctacatgtagaactgagtccttgcttactgtcagccagggctactcttagcccttagagtccctcactggtcctcgcatgtggcccctgtactcagatccagcaacagtgcatcaaatcctgctgctgcttctctgccttcctcttctgccctcaactgggaggaagctctgcttttaagggctcatgtaattacattggatagctcagatgatccccctatgttaagatcagttgattagtaaccttaattacatgtgccaagtcacttttgccctttcttttatgtaataatggactatacttcctgattttttcactttgctaaataaaaaggtggcaattaaaaatactttgaaatgttcctagaggtcttctgggtaaaaaatagtggtttgagtagacacatgtaattttgctttctcctaaacccccacataagataaagggagttgtaaaaaagaaatcaatgcatgaggacagggagaatgagaaagaaaacaacagcaagaaaaattttgcaagcaaagagtacatgaatgattcaatttaaaatgtaggagtggatggcatgagatttttttgtggggggaggggaacgtgggcatcagaggttgctgagtacaagaatagtttgaaagcagctaatgcagttacatccttccatcccttcctttccttccaccgtgatgctgggtgatggcctccgactttagctgcatgttgcacatttctgcagaaggaaaaaccaagggcccaggagcctccaggtattcttgggagttaatatagagaccacctccattctctagtcttctaaccccttttagcttctagaacattgacagccaggcccttatagatgaaaaggggcctcactgtggagtctaaccagcctaagatgggaaaaaaatacaaatgatgctgacaacagggatttcccagcaaatggcccaaccagatcatcctagacagaaacttagccgcccaaggactcagagcttccagctggttcctgagtcattcactcttagtcatgcggactgccagggattactagatggctaaagaaagtgcctaatatgaaggaaagcaaaacaaatgaaaaaaagcaatttgaaaggaagtctatttagagaaaagaacattttgaaaaaaattcttgtatccatgaaataagaacaggatacaataaaaaggaacagttagaaaacaaagttatcagaaaatttttcaaaaataagagcagagcaaagatatcagtagtagtattagaaaataaagttcagggagtctttcagaaaatagagcaaacagatgaggagatgaataataaataaggcagaaaaggtaagaaaattaaagcatcagccaggcttcccacatcaattgataggagctaaccgaaagggaaaacagagaagaaggcaagtgtcaaaatcattgaggaaaatattgcctgaaataggttattagcttctctatggaggggcctgtggaatattgagccaagtagttgaaggcagacccagactagtaccctcagatgtcaatatgcttggaagaaggggatgatgctacaagttacacagagaaagaaacaggtcaaatacagagatcagaaatctgagtggtttcgggcttctcaatacatctgaatataggaggtgggggagtgatgccttcatcatgctcaatgaaatggatccccagcttagaactctgcacacagccaaactcattcaagagtgaaggtatcctgtaatcccagcactttgggaggccgaggcaggcggatcacttgagaccaggaggtcgagaccagcctggccaacatggcaaaaccctgtctccattaagaatataaaaattccacaatggttgaactagtttacagtcccaccaacagtgtaaaagtgttcctatttctccacatcctctccagcacctgttgtttcctgactttttaatgattgccattctaactggtgtgagatggtatctcattgtggttttgatttgcatttctctgatggccagtgatggtgagcatttttccatgtgttttttggctacataaatgtcttcttttgagaagtgtctgttcatgtccttggcccactttttgatggggttgtttgtttttttcttgtaaatttgtttgagttcattgcagattctggatattagccctttgtcagatgagtaggttgcgaaaattttctcccattttgtaggttgcctgttcactctgatggtagtttcttttgctgtgcagaagctctttagtttaattagatcccatttgtcaattttggcttttgttgccattgcttttggtgttttagacatgaagtccttgcccatgcctatgtcctgaatggtaatgcctaggttttcttctagggtttttatggttttaggtctaacgtttaagtctttaacccatcttgaactaatttttgtataaagtgcaaggaagggatccagtttcagctttctacatatggctagccagttttcccagcaccatttattaaatagggaatcctttccccattgcttgtttttctcaggtttgtcaaagatcagatagttgtagatatgtggcgttatttctgaggcctctgttctgttccattggtctatatctctgttttggtgccagtaccatgctgttttggttactgtagccttgtagtatagtttgaagtcaggtagcgtgatgcctccagctttgttcttttggcttaggattgacttggcgatgcgggctcttttttggttccatatggactttaaagtggttttttccaattctgtgaagaaagtcattggtagcttgatggggatggcattgaatctataaattaccttgggcagtatggccattttcatgatattgattcttcctacccatgagcatggaatgttcttccatttgtttgtatcctcttttatttcattgagcagtggtttgtagttctccttgaagaggtccttcacatcccttgtaagttggattcctaggtattttcttctctttgaagcaattgtgaatgggagttcactcatgatttggctctctgtttgtctgttattggcgtctaagaatgcttgtgatttttgtacattgattttgtatcctgagactttgctgaagttgcttatcagcttaaggagcttttgggctgagacaatggggttttctagatatacaatcatgtcatctgcaaacagggacaatttgacttcctcttttcctaattgaataccctttatttccttctcctgcctaattgccctggccagaacttccaacactatgttgaacaggagtggtgagagagggcatcccagtcagtgtggcgattcctcagagatctagaactagaaataccatttgactcagccatcccattactgggtatatacccaaaggtctataaatcatgctgctataaagacacatgcacacgtatgtttattacggcactattcacaatagcaaagactcggaaccaacccaaatgtccaacagtgatagactggattaagaaaatgtggcacatatacaccatggaatactatgcagccataaaaaatgatgagttcatgtcctttgtagggacatggatgaaattggaaatcatcattctcagtaaactgtcgcaagaacaaaaaaccaaacaccgtatattctcactcataggtgggatttgaacaaggagaacacatggacacaggaaggggaacgtcacactctggggactgttgtgcggtggggggaggagggagggataactttaggagatacacctaatgctaaatgacgagttaatgggtgcagcacaccagcatggcacatgtatacatacgtaactaacctgcacattgtgcacatgtaccctaaaacttaaagtataataataataaaataaaagaatataaaaattagctgggcgtggtggtgcatgcctgtatcctagctactccagaggctgaggcaggagaatctctggaacccggaaggcagagtttgcagtgagctgaggttgcgccagggctctccagccagggtgaaggagtgagactctgtttcaaaaaaaaagagtgaaggtagaaaaaaaatgtttcagacatactggatgtgaaaaacttgcctttcacattgaagaaactcgtgaaggtgaacaaagactggatcttctttagggtgtatcccaaaagatgtaaagggaattctgtgcactggtccagatggaaggatctccgaaggccccaggaggatttctttttgaagaagaaatagaaataaaacatcagatgtgaaaaaactcagggtagatttagacaactgacatcaaattttcggttaaatattgataaattcatagaaaattaagcaaacaaaacaagaagttgtacgggaaaagaaatgaaatcatgtgttatgttgctcactctgatagctcacatggtcataataaggtcaactatgaaaattactccagccagcactgcagtttaattagtggagagattggaaaggacaagcatgaggggtggcttgcagggagagggatttatggggagtaaagggttaagtcctcctcttccaaggtagaaagcagatgcataatgcgtaaaactgaaaagctggggaattgtaatacaaaatggcgcgatctcggctcaccgtaacctccgcctcctgggttcaagcgattctcctgcctctgcctcccaattaactgggattacaggcatgggccactgcgcctggctaattttttttttgagactgagtctcgctctgtcgctcactgcaagctctgcctcctgggttcatgccattctcctgcctcagcctcccgagtagctgggactacaggcacctgccaccatgcccggctaattgtttgtatttttagtagagatggggttttaccatgttagccaggatggtctcgatctcctgacctcgtgatcctcccacctcggccttgcaaagtgctgggattacaggcgtgagccactgcgctcagcctacatgcagacagttctaagagatatttgggtgtaaacatcaagagtcagctagaagttggaagtgtcacctagaaagggaaaacctgacttaagggctgggatctgctgttttctcaacatggtttttacagtagttgattcttagattatgtgcagttatgattttgaaaaatgaatagaaaaaagcaaatctacaatgcacggcatgtgataaggggacatatttcacaaaactgatttttatttttttgagatggagtctcgctctgtggctcaggctggagtgcactggcgcaatctcagctcactgcaacctctgcttcccaggttcaagcaattctcctgcctcaacctcccgagtagctgggattacaggcgcccgccaccacgcctggctaattttttgtatttttagtagagacggggtttcgccatgttgaccaggctggtctcaaactcctgacctcaagtgatccacctgcctcagcctcccagagtgctgtgattataggcatgaaccactgtgcccggcctccacaaaactcattttagttgtgcatgtgagtgtgcgtgtgcactggattgacttttgttaaatgtatttcttactatgggttgtgataagatttgaaaacccttgtttagtggtttctcattgtcagttcacttttcttttccttttttttttttttttttttgagacggagtttcgctcttgttgcccaggctggagtgcaatggcacgatctcggctcactgcaacccccgcctctctggttcaagtgattctcctgcctcagcttcccgagtagctggtattacaggcgtgagccaccacgcctggctaattttgtatttttagtagagatggggtttcaccatgttggtcaggctggtctcaaactcctgacctcaggtgatccacctgtctcagcctcccaaagtgctgggattataggcgtgagccactttgcccagccagccagttcacttttcacacttatgaattgttgagatattttacagttgagaatgtgctacttttttaatttaaaaaagggcaggagggaggaatattaaaggtgagtacaacactgaagccaaggagccctgtttatgatgactgccagccttatatattgtagcaagcattctccttcccagcaggggcacctccaaccagcagcggccccattttcatttataatacaaaggtggtaatggtaagtgtgatgctggaaacctttttggaaaatcacttgtaagtccaccaccaccccatgcagccattttcatgctcttaacattccactttggcctttaagcacatgcttacaaattgtctcataattgcaaaccatgaggttcatgtttcacttaatgtgtattctttttctggaggcaaattcttagtcattagtttattgattaagggtgtgacctttttttgggtggtaaatgtaaccatattgctaccaaatggtagtaaccgtttcatctgctgccaacaaggaataaatgtgtttgccacaatagtggtggcaattttgttaaattaaaaagtgtaaagtaggccgggtatggtggcttatgcctataatcccagcactttgggaggctgagatgggcagatcacccaaggtcagtagttcgagatcagcctggccaacatggtgaaactcctgtctctactaaaaatacaaaaattagttggacatggtgtcggtcgcctgtaatctcagctactcagtaggctgaggcaggataatcacttgaacccgggaggcggaggttgcagtgagccaagattgcaccattgcactccagcctgggcaacaagagcaaaactcttgtctcaaaaaaaaaaaaaaaaaaaaaaaaaaaaaaaaaaaaaaaagtgtaaaataggccaggcacggtgactcacgcctgtaatctcagcactttggaaggccaaggtgggcggattgctttgagctcaggagttcaaaaccagcctgggcaacatgatgaaaccccgtttgtacaaaaaatacaaaaattagccaggcctggtggcatgcacctgtggtcccagctactccagaggctgaggctagagaatcacttgaaccagggaggcggaggttgcagtgagctgagtgcgccactgcactccagcttgggcaacagagcaggacttgtttaaaaaaaaaaaaagtgtaaaatagtatatctgggttgtctttaagttttatttctagtgacattgaaaatttttccttttttttaaatttttttattttttaaagaccgggtcttgctctgtcacccagactggagtgcagtggtgtcatcactgttcatcacagcctggacctcccaggctcaagcgattatcccgcctcagcctcccacgtagctgggacttcagtcaccacacccagctaatttttgtactttttgtagagatggtgtttggccttgttgcacaggcttatttttccatttgttacgttattcttccctttgttattctttcctttgtgtataatgttcatatcctttgttcatttgtgtacaacgggggtctttttgaagtatgggtctctataggttgcagatatttactgtgtcataattttttcagctgcagataacatttgtgtttccttttttattttaatgttacttttattcatggggattttttagatttgttatctgttcaggcttggtagtcttgtgctttgaattgttttttcctgttgcctcaaaagttgaaggtgggtaaaatggacttgaaaaccctgttctctgggtgtggtgtgtgcatgtatgtgcatatgccctttaaatctgtaagttgttatttgcttattatttaactcccctcaagttgctaaccagttatctcactactgttaaacaattctccctttgccctgttttgagaagttggtattttgataaacatgtgcctccttcctgccacactgatgctttattttctatcacattcttagagttgagacagtttgagatcctaattttttttctaggcacacaaaatagcttttggagattcttctctgctggaatggtacctaacatttgtgaaaagtttacccatctctacttttaggaaggttcttagtcatgcgtgcgtgtgtgtgtgtaagataaagagtgttggtgttctttgtggatgcatctgctcatagagggctaacttctgccttccttcagtatgatgtggtttagcaaatgaggtgagatgctagggaccatggtcattttgggaatcattttgggtcagatctgggttctagtttcagcactactgcctttatcagccttcctgcatttttgtgtaaatgccctagtagctccgttggtggctcaggagcgctcagtccttttttcctcccttggggttctgaagcctccgagccatacctgttgtgcagctccatcattacccctccacagtcagaaggccaccttacactgtgtaggaggatgtggcttaggctggagtcctaatgagtctcccatttaccttcttcagcttaaactatgtggagaccaggatctgccagccccacagagggtcaggacctgctttccaacccgctggccaacacagcagagagggacagattgagaggtgccttccctccctgtcccgaggttaggtgggtggcaggggtgggaaagcggggagcggagaaggaaaactgaaatgtttcttttcaacagtttattgcaatagtttcctcttctgtgggttgaggatgggggaaaaagtgtcactgggacagccccacccctagacctcatggggttatcctgggttgtacaaaaatggccaaaaatggcataatactggcggtgcatgtgctctgggttgtaagtggcacgtgcatcaggatacgttgtctgggtgtggcacacctcttcttggatgagagagggtttcttcctagttattccgcagtgtggcccctagtgtagtttcgagtgttgatgttaccaggggggaagtgagggcttggagtttaggacgtggctgtgagagtctctgacgggtgtaggtgtggaccccagcatctgaaggcagaattgttccctggttggtcatgcgtgttgggtggaaggtgaagcagcagatggtgagggaagccaggcgccctgtggagaatccttgctccagagcgctggccttcctgccaactgcatccccatgaagtgttccctgtagcctttccatgttctgtacactttatgggtgtgagctgcaggagaccagggaccgtcaggttgagattccctgtgttgccacaggacagtcattttgcaaaggccccgggcaggggagcagaggtgagccaccaacactgtggaaagcacacagacacgtttgctaatgagctggtttctttgtggagctttcatcaaggaggaagggggaagtttggcttttcttactgcttccggagagttctttacagggttgggttaaatgaggtcaaaggagcactctgtaggatcccaaggcattggattccatggctcgcaccagccctccttagttcctgaggcccagctccctggagggcacagccttctactttccaggctcctctgggaaccacgaggaagagaggaggcgggattgtcttgtccataaaaaaagaatagagtttctaccgcttagaacatttttctgcctcataaggcatttccagctgaattgacagttctctgtgataaatgtacttgagttttaggttaaaaattttttttcatcctatatgcattaatccagacatggatttatggttgggtagcccaaccctcccctgaagggaaaaaaaagaacaatttaaaaagtcaaaccattggctgggtgtggtggctcatgcaggtaatctcagcaatttgggaggccctggcaggaggattgcttaaggccaggagtttgagactagcctgggcaacataacatagtgagactcctatctctacctacacaaaaaattaacaaaccaacccagtgctttgggaccctgtaatttgaaacaagctggtgaatgctagttatagctaccgttaggttagttgcctacacggagcccctctctgcgaatccgtgtgctgcaccacagctcaacaggcccgtctaccttgtaagatccccaaggggactgctgcagccctcagtgcctaagctgatacctgatctgctgggcatgggtctgctggcatgtcagtatcaccgtgggggcgggggtgggggacttgtcggaaatgcagattcaaggctccaacgcagaccttcttaccagaaccttgtgttgggggctgggatctgtatttaaaataagtgattctgatgctgccagccaggaccctcatgccagtgacattggagcaggtcactaaaagccccactttagttgaggatgctgaggtcctgagagagcagggacttgcatgggctgaggtcatgttgctgaaggaaggcgcctgtgtctcttccttgagagctgcttttctccctgcagccgctctggcccatacagtgttcaggccttgtgtgtgtccttgtgtcctgtagagtccttgggcaacaggtggttgtgttcacactcattcttggaggcaagttttatggatgtgctcttgtgatggtggggcggtggtaggggggaggtggggatagggcagctgggtagccgtctgcctgtcattctccccagctggtttctgaggtcagacagaaggagggtctggtgggtgagtggtggtgtctaggctgtgcccgtcaattccacaccgtgggagaggtggagcggtcacaggttccgtttccagaggagtgtggtttcatgtcccttcttggcacttctttctcagaacattgcagaccagcagccagcctgccgtggctgcctcacaggaaggggttttgcaagtagccactccgtggaagctggtttctcactggcggatgtgggtgggtcgcctcctcacctctagggtggccttgtctcctttcgccttgggctgtgttactctcctcacctgggaagtggggggtgagcagggggctggcatgggaccactgccctacgggcctctgatcctgtccctacctgtgcacttgaggcactccctccttccccactgttcagccactgcattgggggcaggggaccgtggaggacttcggggtccacctggattgccactggggttcaaaaaggaaagcagcaaaggtaggccaggccctcagaaaagtccctcggaaatagcaccctcctgcagtaggatctctgaggttgctttgagggttagacacagataaaaaacagtggccccacccttcactctgtagttcacagggtcttcccacataggctgtgtaatccaagcttcattacagccctggaggacaaagctatggctatagtctgggttgaggtggagtggggggcgagtgacaggggagggagggagcagggggatggctgctggctgcagtggccttcctcacctctgagggctgagcttcagaggttttcagaaaatgttgcatgaatgagtatggagtcctcatcttggcttttcttcactgggcacagttggatcatgtccagacctgcctgcacgttcatctcccaaacatggctctttgtggtcaagcccgtttcttctgttggctctggtgggtggaaagaacgtggactgtgaagtcccctgtccttggttccaatcctgggctgtcattgctctcttgtccttgggcaagtcatgtgacctttctgaatggtttcctcaaccatgaagtggaaaaaaatcaattcccaatcgagaggtgatgagatcaatatttgggaaggctccaagccgaatttctggtacttagaagacacttaaaaagcatctttcttcctttcaaaaatctcccttatcctttcgtttgtcttttggagagctgatttaacctgagttttgcattacctatacctggccttggtatcaggcctctgcttggaccagtaaagggtcatgagggaaatgatcgggagctttctagaatccgcatatgagctggtttgggggaaaggttttaacgctgagcctgccatctcactagtcacacatctctccgcagattctgcttctcagaagatgcactattatagatactctaacgccaaggtcagctgctggtacaagtacctccttttcagctacaacatcatcttctgggtaagtggatgagagctgccacattcccttgtttagtccttcattcagtaaattatggttttccacacactcttgatttgccagacactatgtaaggctctgggataaggtggtgggcagggtcagtgacccctaccctcacagaaccagttgcagctgtggggatgggggaaggccaaaggccgaggtgattgaaagccagagtaaggccaacccagccttgggggttcaggaagccttggggctctggcccagatgcctgtctgtctcccctacctgccccctgttccgatcctgggagtgccccaatgagacatcagcagcaaggtactttgtgtgcatctgactatgggccaggccctgttttaggttctgggaggtgataacagacaagggcaataaagtcttatccttgtagtgcttatgtgtaaccaagagccatgttagcctcctgagcaacaggacagtgagggagaagctccttggatagggtgaccagggacaggcattctgtggaggtgacttgtgggctgaaaacttgagtactaatgaagaggcagccaagcaggagtctggggaagaatgctccagatagacagaatggcagctgcaaagggcctgaggcaggaatgagctttgtgtgtgcaaaggacaaacagaaggccatgtggctggagctgagtaagtgggagaagggacacaggtggggacagaggcatgcaggattcaggtcacaaaggatcatacaggtctcaataaatagttggaattactttctactgctttaaataattattggaaggcttgtaagttgggtggtgtgatctgattttgtagtgactgcagagtgaggggatggatggtggtaccaggttctgagatgggatttggggtagaaggggtacatttaagttatctcatagccagcctcagggagatactatttcctttgtcgttgactgtcctggagatggaagtcttggccaaccaccatcagaggaagggctggaccagatgagagcatggaagatgggtgtgttgactgagaagaggagaggtctgaatattgagccctaggatgctagaggttgggtcgaggaagaaaacccactcccaagttggctgagagcgagtggcctgtggtaaagggaagaccaggagattgtgtattgtagaagcctttaaagtagaaaggcacagtcaaccatggtgcagggaggtgaagaaggatgaggacaggacattggtaatggcttagacaaagtggaggttgttgatgttgacgggaccactgtgagctctgggtaggggatctgggcgggtggatagaaacccagctggagtcggctgaggagccaatgagaagtaaagaagtgaaggggatgactcttgacagttcttccaaggatgcttgccttaaagaggagaagaaaaatttggacactggctggagatggtcaagggattaagggagatatagcatgtgtttattgccagtgggattggtccagggagaggcagacattgattctgtgcaggagggcctggggacatgatcatgcacagagtctttgaaaaccattaaacatagtttatgaatatctgtgtgggggtaggtggagaaagaaggacagaatgagtggccatgatgtcacattttgcttctactgcagatttggcatctcctatggggactggaactcttgaaaacaaggcagacttactaagccttctcagccttgcaagcttgattttacagcttcatctcctggtgatttatcttagtatgtttggggattttctgtcctagagaaataaggtgggattcaatggcttggtcttttagcccacatcttttcctgtggtccgataactttgcaccaacatctgcatcattgtccctggaatagggcattgctggatatttgatgtggtgcctctgggtccctcttaatgcgggagtccatgctccatcctcatgatgtatggcttctcagagcagcattgttccctgtctggagagccctctggccttacctggtgttcccctccaccatcccgcacccccaggcaagtatatggtggaggttcgctgggctaggcaggcagtctgtcacttgtgcacttggacacccagttgctcctctctgtgggtgtgctgcttggctttgtgcctcaacctccaactctcatcttgatttctgcagctagagcagcactctcccactactgctgtggctgagggccctggtatcttcatttcttcagagggtttcaggagagagtttttgacatcagggagctctactaacttgcccagtaacacgtttgcagcactatattccagtagtggagtgcatgaatccagcatggtagcaagtctgcttggtggttgaagggtgctgcagtgtttttgggcttttgcagatttggcaatgtgtgttgaaagttaatcatttttcagttagtgtgccttggggcagaacaggaaggaacaaacaggaacagtcaggaagaccaaacatgagagagcttggttgggaaataagagtgggaggccaagtgccttgcctagggggaagctgctggaccctccccactgggttcctggtagtgatgtgcagtcttcatttgcaatggagctggcaaatggggtgaggcctgagatgggcgcacagacctctgggaagctcacggtgtagcaggagggtgccgggctggctctgggcacccagggcctccctgagctgagtgacctggctaagcctcagtgttttccttgtgatgtagcactctcagctgcctagtgtctgcctcaggttgctgaaaatgtataaagtggaatgcccaagcccttacctcttcagataagttttctttttttttaaatggagaaaatatgaaagtaggataataaaatgaactccatgttcccaccatctagcttatttgatttgtatccccctgcccaaccctttggattattttgaagcaaagcccaggtagatgattttgcagtgtttttatttgtattttgtttaatgaattaacagtgagcagtggtgcagaaggattgcacgtgttgatggtggacactgggctcagcaggcaagtttgaatgtgcagaaggcaacttgttgcttctgtgaccaatcctaggtgttgggacaaatatgaggttttatttagtagtttgccctcacttagaattattttcacaggcctggcgcggtggctcacatctgtaatcccagcactttgggaggccgaggcaggcggatcacgaggtcaggagatcaagaccatcctggctaacacggtgaaactccgtctctactaaaaatacaaaaaattagccgggcgtggtggtgggcacctgtagccccagctactcaggaggctgaggcaggagaatggcgtgaacccgggaggcggagcttgcagtgagccaagatcgcgccactgcactccagcctgggcgacagagcgagactcagtctcaaaaaaaaaaaagacttattttcacaatagcattctttatagataaataccgtttggtacctaatagatttttttaagctctctttctgactttggggccaaggttttcccgggattgttaaaacctgcttgggataagaaatgtggatgccactgatgtttgcatgtctgttctgaacctcttggtttacagaatgagaatggaatgggcttcatgaggttcttatcacaaggatgttagggaaaatatgcttccatgcaacatggctttttgagagcgctagtgttttttacttactgaaaaaatcattctttggttgtgctagacctgtttttagtgcaaaaatctcactttgacttaggaaatgcaaatcaaaaccacaatgagataccacttcacacccattgggatggctattattttaaaaaatggaaaataaccgatgttgatgaggatgtggagaaattgaaacctttgtgcactgttagtgaaaatgtaaaatggtgcaattgctatggtaaacagtatggtagttccacaaaagttaaaaatagaattaccgtatgatccaacaattccacttctgggtataaccaatagagctgaaagcaggatctcgaagagatatttgtacacctatgtgcacattcatagcagcattatttacagttgccaaaaggtagaaacaaccaaagtgtccatagatgattgagtggataaccaaatgtgatatacagatgtgaaagagcttaaaaaggaaggcagttctgtcacatgctacagcatgggtaaaccttgagtacatagtgctgagtgagataagctagatgcaaaaagacaaacactgtataattccacttatatgaggtgcccacagtagtcagaatcatagagacaggaagtagaatgttggttgctaggagcccgggaagggaagattggggagttgttggttagtgggtacagaagatctcactttgatgtgcagaggaagggaagctgggagaggcgtacactggaggagtggcatctggctctttgtctttgttcatttataccccccactggttccacaaagcacttggacttttctaagtttgccgagtgaatcctctagagggatgattccgataatgtctgcaactccagggttggtttccaacacaagcattggctttaatctgcatgcagaggttggatgaagtccttgcctggatctgcttcagagatggattaaaagtgaagaactgagaccctttctaaatagactgtaggcctgtgttacacaggaaagtcctttgcttgcctttagtttaaaaaaattttttttaaatgacattctgccattggctttctcagtgacttgggtctgtttgagcctacccttgtaaaatgtgtgaattcacctctgcgcagcctgtttctgagtgagatgagagccatggacatctgtgctctgtgaccagcatggcttaaggcctattccttcaaagtcacagatgcctcctgtgagtagggcgaacatgtaatctgtggttcaacttttgacagtaagagaattttgagagagtcttgcgaattttgccagaacaacaggtgtaccccaggcctctcctgtgcaaacctgggcatgtggccaccctgcacaagaaagggaagacaagcccaaggtggaaagatcaactctcttcccttacctctgtgtagggcatctttgcaggtggggtcttattctcttcctctgacttttattatgctcctctttatagaggacttgccacctcccaggatagtctgctgttcctgggctcttctgactgatggaaaattgcccttatttgagctgaactctgctcctttgatatcagaccccaaggcctgatccctagatcttcagacaaatgatttcttcatttccatctcagtaatgcagtcaaaagggaaaagtctagtgttttaataatgtatatagtgtatttttgttttcactgctgggaagatgtccctttttctcttcaggtagtatttaatcaacttttgtaatttcgtggaaattcataaaggctaaacaaggcatcccaggtttactgcatttcctcttccatgccccagcgtcctgtctgcaggcacacagtttcatatcctgtgagtagtatccttgcagtcttaagatacgcattttcacatcagcatctgctaatatagaacatctactaatatagaacattccaggttgcaacattatctttccaattgtatttttagaaattcccatattggacatttaggttgtttccaatttttttgctatcctagataaggatgcagtgattagtttatgtaatacgcattcttccctttagggaagggagggaaattatttgctgagatagattcccaggagagattaattgggtcacaaggtgtgtacattgttttgacctgcctgaacatacagtcaaaatcacatccccagaacgactgccccaattcataggaagttgactgtcttttggcactgtgtgtgtgtgtgtgtgtgtgtgtgtgtgtgtgtgtgtgtgtatgtacatgtgtgtatttcatcatttaggcttgccaaggcagagggcagggattgcttaatcagaaactccactagaacttaaggagtggcctgtggtgctgatgcctgcatggcctcagcccctgatttccccaacttaggcaagtgtgaggctgggaccaccagttgggattactgaggaagggatgttcaaggtgctctgagattattgcctggcacacaggactgttaaatgcttgcacgtactttcaagtcttaagtagtttggtgtgcttgtataactctgcctccttggctggtaaataatcagcatggcatagtctacaggagtgatttttcttgtttgtactttttttctttaatggaaatcctttttataatgatcacttctgttgatgtctgatttagatagaataacatttattcatttcaactgtacagttcagtgacagctgtacatgccacataatcaccatcatcacaatgaagatataaaacattcccatcaccccagaaactttccttgtgcccctacagtcatgcctgccccaccctaccccttccctgggtgatggttgttctgcctcctgttgctataaattaaactctttggtatctgacttttttttagttaggtggtagtgtctctgttgtttttctgtttttaattactttttaaaaatcttttgaaataatttcttattttttaattgtacaatatacgtaacagaacatttgttattaaaaccatttaagtgtatagttcattggcgttaagtacattcacattcaccttgattggtgttcttatttttattattttttcctttctacttgggattattttgctttttcttagctacttaaactggaagattagatcactgatttttagatttttttcctaatataaatatttgaagctgtacattttctgcatcccacacattttgatatgttttcacttgatttggtaaaaatagttcgcatatgcatactctatgaactgtgtctcctcccacctccaggctgacttcaagagtttctccttttattctggattatagcaattttatacatgctggtatagttgtctttgtgtttattctgtttggggttcattgggcctttgagatttgtgggtttatagttttcatcagatttggaatattttagccattatgttttcaaacgcacaccctttttctccccttccctgtcccatttccctaggacattgtttatctagggcacagaggctcggtttagttttttattttgttgagtgttttaccattctcctttagtttccatagctttgtcttcagctttactgatcttttcttccatactgtctcattggctgttaaacccatctagtgaagtcttcaattctaatattgtagtttctatttctagtcgttacatttaggtattttttatgtctccaatttctttccttatcttatttatattttcctttaaattcctgaacatatttgcaatacttgttttgaagttgttgggatttcatcttctttgtcattcttgtgtcttctatttactgaattttttctcttatagctcacttctttccttttcttgcctatctagtaacttttgattggatattagttatagtttttctactaagtattcttccctaacagtattaagtcttttgtgtctgacatctttcatttaatatcatatgtgagattcattcatgcagttatacgtagttgtagatcatttattcttgttgtgtaatattctattgtggggatatataatttgtgttatttacagttttaggctattaagacctgttacagtgatataaaaacataccagtgttggagacctgagtatagggtatcccaggctttgtgtggctgagcaggatgacatcccatctttcctctccaggtccagatggttttagtgtgatagtttacagctgagcttttcagactatggcttgcaggccaaacctggccttccgcctgtttttacacatacaattttattggaacacagccacacccattcatttatgtattatctatggctgctttcccattataacagcagagttgagtaattgctacggggatcatccagcacacaaagctgaaaatatttactatttggccctttacagaaatgctgaccactgccttagtatcttgattttctacccactgttaatcactgtgaactgtgccaaagttaggttggggggttccctctctcctgggggtactgcctatcacctcccttgaatggctgtgctccctccgcctgccttcatttccagggccttgactcaggttcctgggcggggctcagtgggggtcaactctgttatctggcaacacagagacagctgtggaagctgcccctggagccctctgcacagtccttccccacattggggccctcacatgggtttgctggctctgctgggagggcacatgtgttgccttttctcagaaccacccttccggcaggaggaaaagctggggtgtgatagctatgtgaccccatgcaaggcacctcctgctctgggctctgtttccctctgtcataaggaagccgagccctagcatcccttctggctcccagaccttccgaactcccactgacaagtggcttggttcaggctttcaacacaggacagataactgcagctcctcccttggcccactgggctctcaggccaggttgggtctggggtctgcaccctctggtcctttttggcttcaaattctattcaatcgtcagcatttcaagtggccacaagcatctctgttgtttcctgaatgccccaggcctggattcaggatttcttattctggagagtaccaggaccctggggtttccgtctggtgtaatttataatggcaaaactcagccagtgggaggtgcatgggtccttgctgcttattttgctgattgacagactgaggcccaggagagggatggcttcctcgagaccctgactctgtgagttagggacaaagctgagactcagtcctggcttcctccactctctgctgttttctttccatcatcctttcctacctcacttgaaaagcctccagaaggccgtatttccctaagctctgcttcactgttgtctccagaagcccagtaaaacaggtgcctctggaaagcacttggtcttaggacagaagctggtgctggaagtaattgggggtggggtacagaacaccagtgtcaagagaaggagactctgtcttcaggacagcagatgcttgtggcatatccttgaacgcccctcacatctctgctctgtctgccgtgcgggagggcatggccaccttgagactggctctgtgcctggagtaagcatgtcacgtaggatcttccttcaatctttacaaccttcctgtgacctaggaaagataatccctgttttgtagagaacataggctcagagaaggtcttggactcgcatgaggccctgtcactaggtagctacaaagcagagactggacccagggccggctttgttcaggggaagaggctctgtgaatgtcaggctgagtcagcgtgtggattgtgcaagacccggaggccagcagggcagagcctgagagcatcgcctgctgctggtgattcgccttgatcttgctgaggaaaggcctctggggcctgcaggagttgccaagtacttttatacacgcttaaatgaaatcttgcaaggagccaaggccattaaatcatgggtgagaggctgcctttgacctgcttggagctgcatctttctcctccagttcagcagggcctggccgggtgtcacttccttttgtgacttgattgtgcttgggtaaagtaccacaagcttgctcgtgtggtaagtggatttcttgtgtctggactctggctggaccagcccagagtgccccaagaggacctcctgcctttcgcaaggtcatttgcctaaggtgaaaggtcaatatttaatcttcacagtgacccacaaagaggccctgctgccttgtccacctgccctggttgggacacagcgtggtctcactgcctgacagtgtgggtcatttggctgtagagctgcacaaccccaaagcccccctgtggaattcctacatccccgggctcttgtgtgagtgcccgtgtgtggaaggcagctgctctgtgggtggtaagatactgtgttgccagggtcagaggcatccaggtttggttcttaagtctgccaccagctagccgtgtgaccttgggcaaaggaccaaattgctctacatttgagctttcccatgtgaaaaatgagggtaattgagccagagttatgggatatggagggatagccttaggtccattaagtatttaatgcagcgcacagctcccaggaaagggcagctattcacagtgaccatagcagtttaggtgctcgctggtccagcagaggaggctggcctctcctcaagctgggccggagctgggccccgttcttcagtaggtaattcaattaggtcatgggagggagacaaagaaggtcacttgaggctggagggcactcagctgaaccctcactcccagaagattggcagccagggctcacagcagccagggcttacctggcctggccccatggaccatctgctgcagagttccagggaagggttccgtggggtgaagcgggccaatgacccagttcattcatgggaccgttatgtgagctctcaggcagatcacttcccctgtctagtcctccctcaatctcctggtctctgaaaccaggtttgttggtactcagagttcctgccctgggccactgttcattgaacccatgatctgacatgtgatccccaagttcctgtctttccggtgtgagttaactttagttcttcctttaaaacagaatgaaaacaacacaaggccttattcttttttttttttttttttttttttttttttttgagacgaagttttgctcttgctgcccaggctggagtgcaatggcgtgatcttggctcaccgcaacctccacctcccaggttcaagtgattctcttgcctcagcctcctgagtagctgggattataggcatgtgccaccacgctcggctaattttttatttttagtagagatggggtttctccatgttggtgaggccggtctcaaactcttgacctcaggtgatccgcctcccaaagtgctgggcctcccagcactcggcctcccaaagtgccgagatttcaggcatgagctaccacgcctggccaagtccttattcttagagctgagagaaagagaactgcacgcagtggtggggagctggcttccccagtaaacacagagtcagccagggctttccctgggggccttgagaagaacagcaagcgagggagggtgtggtctgtgggccatatgcagagcggtaagcggccctacagcggccctgcatgtggggaaggggcgattggaacagaggtgagcaggagcaggcctacctttgcatgggcactgtgcccctgagggtggggatatgaactgctcttgaggtcgagggtcttttttgagaacttgtgcagaccaaaattccttttgtgaaaccagtcacctcttcctattgtatctatttagtcactatttagtcacctaggagaacaaaacaactaaaacagcacctcagcgtgaattcacagaaacctattaatatagatggaactgacgctgttttttttttttttctttttttttgggagacctggtcttactctgttaccacccaggctggagtgcagtggtgcaatctcacccttgacctcccaagttcaagcagtcctcccacctcggcctccctggtagctgggaatacaggcatttttttttttacagctaatttttttagaaaaccttttttttttttttttttttaagagatgggggtcttgctatgttgcccaggctggtcttgaacgcctgggctcaagcaatcctcctgcctcagcctcccaaattgctgtgagccactgttctcagcctgaggctggtattaatgtgggaaacaatacccttagaagtcagacttagtagtcaaggtgagagaaggggtgagctgtgaagtgcagtgtggaggagagaggggagctccagcagtggttttgttgagtgtccttaaggtagacttttctcacctgtcccatgtggccccacaggatgagcggactgtcatggaaagctgttaggcaggggctggaatgtctgttgggaatgctggatggggcatcggcctctgggcttgttctgctctgaccataggcaaatgcccctgtatagagcttgacccatgcacctgggccaggctgagcttttcttggcccacatttgctctgaatgcctttggattgaatcacacccagaagtgtgcctgggggtagctagaaggacccaggcaagcactgtcctggtcttgaatcctggggagtcactcatgcctgctctgtgcctactgagggccaagccctcctcgttgttgggctgcaactctgaacaaaacaggtaacatctctggcctcagaagggcttagctggggagacacaatagagagacagcccctgtggtctgggatcagtgccgcgaagaaaatcaacagaggaggtcacacatggaggatggggagcagttccactcagggtggtaaaaggaggccttgaacgcagtgagggaggagccaggaatggatatggaggaagagcattgccggctgagggaacagtgtccaggctctgaggcaggggtgattttgatgacttcaagaaacaagaatgtcagggtggcccagggagtggcgttggagcagggaggtgggaaggagatgccgtgggagatgtgtgtgaagcctggctgcagaggcccttgggggccatgggagagaccgtgcattttcttctaggtctgcgtgggaagtcactgcagagtttcgaggaggggagttcccagctctgtatttttgaagggtcagtcttgttgcttggaccagtgaggagccccgtgggatccagactcgagtgggtggagccggggcaggtgggagcagagacactggaggaaagctggtcgaatgcactgtgtatttggaggcagaaccagcagagggtcctctgggttgagtgtagggcaaaagagaaagaaggcaccaagcctggggtctgggttttctctcttacacttgctgggtggacggtggtgccactgaatgagacggagaagagttggggggagctcggttggggttgggggaccaaggctgcgtagtggggcacagtaagagtaaaatatcgttagctgtcttaggaggacaagtaaagtagacattagggtatttgaccgggggcatggccaggactggacatctgagtgtgtcactcagcaatgtttagatggtatttaagccttgtgaattatgagatcatcgagagggctcagggcagggtgaaggagctaggactgtgagtgaggcccaccagcatctagaggggtctgaaggaggaggaggaggaagagcagggaggaaggcagtcaggggcatatgcttggggtccccgaagcagggtgtgtcagtggaatggttggaggaggagagaatgaccagctgtgaccaatgaggtcagataccatgaggaaaagtcttggcctccagctttggcaagagggaggcaggtccctgggggccttgaataagatgggtggggatggagcctgcaggattcggcaggtggtgaccagtcaccttcaggttgctcagcatgccagtgtaagacacctggggagggaaaggaagcggtcatgcattctatcaggaaaacccttcccagctagtcagttcagggggaggactgagaagcgggaaaagggtgtggtgtgatatggtagaaagggctctacccccttggcttggtgctgtatccagtacttgagacggtatctggcactcgggatgtactccgtgaatatttgttgaatgaatgagtgaggagtgaatgaatgaactgagacttgtgattcagcccttctccccactgcctgacattttggtcttggccctccctgggccccagtgctctgcttttgtaaaatggagggattggttcttggtgggggttctttacttagtgttcacagaccattgtgggagccagcagtgggaagctgtgacccctctaaaatttcatgcaaaatactgggcatgtgtgcattttctgaaagtgatctgtgatccagaagaggttggatcacagatcactttcaggttggatgagacttcctggggctttccttgagccctttctttccattctagcccctggggctagttactgagtaaaataggtagaagtggctcaaggcttgagatcaccggtagtcatagagaagcgtggtcctgttatttatcgtgagatggtgataaatggcagtgaaatgccagtgtggtgtaaagtagtcacagaaaaacaggaggcagctttattaacagagcccacgttgtgttttgttgtatatggaaaagccctccctggttcaggaacctgtgtgatgtatttgggtgggcgcctttctgttgtggtgcacatggggtatgggttcctgcaggtgggaagttggggttgggggtggtgctcctctggggcgagctcattgcttagagcaagcctattttcattctctagctaaaagcccagcctttcctgagcatagatgcgccccctgctcattgtagttaacagtagggaggaggctcagccctggccagtgaatggcctgggccactggatagctgcttatctgtgcctggagtctatctccagggctggagagctggggtgtgtggcagagatgctgggctgtttccccctgtcctcaccctgtggtggtgcctggtcctatgcagtctcatcctgtgttgggaacctctgaggggacctgggtcagccctcccaaggggtgatgtcttcgtatacaccagatagtgcactgaaatgagttcagggttgcagaaaggggaagaagcagcacagcctgatgtctgtgacccatagtctctccagggtggagtccgctctgagatcttttcctcttccttccctggggcatagggtcatctgaggttgaaggagtttgtccagatattcaggaaggtaggttcaggttatctgtcatctgcggggcctgaggggccatgtgggatgtgagctaggagcatgccctacctggcagtgtggactttgctctgtgaagcatgttcacagtgctggtttccaacctaacttccttctctctttcctctgccccgcttagttggctggagttgtcttccttggagtcgggctgtgggcatggagcgaaaaggtaggtgtaactgtcgcaggacactgagcttcaggcagccaaaaccagattcgttggacttcattttccctcctccaatctgttccctgacaacaagcatttcttgtgcagtgtcaaggtgtataattgtcaatctttacagacacagctcttgcgtactctgcccacatgatagtattggctgctggaggtatgggctgggctggttgggttttgagccctgtggatgtggagagctcagctcttgtatgcagctgtgcccagagcaggcttgggcaatccagcttcctgaccctgtctgtgcctctgggagcaagcgggcaggtccctgaatacaggcatgcttattgtggaagcccttatcctccaggatgagaaagagcaggcagcagggagcggggctgggtgacatgcccccagggtgccctgtggggcaggggtgggcctttaagcacctctgggcctccttgcccagcctcaggaggagaggggaggagtggagacctggctcctactgtcgggaaggacatggtgcagttgcggctccaggaaggggatgagactggatatgggcagggtggggctgtgctgctgcttgttgccctgtggcaggggtgctggggaggcagtgagggctgaaaaaggccagggagggaagaggggaggggagggaagcagtaaggtggagcaggcctggccagaaagagccaggaataaagcttcctctagtgtcttgagcctaggccttcttccttcagtggaacctccctttgcttccagcaggaggaggcaggagaacctaggtctacaggctttcctgccatggtcttagggactggataaggcccaccttcaggtttgggcaccttccaagtggcctgtgaacccctaaagggcaagagctggggtacgatgtccctttgccccagtgacccagaagcaggttcaatctgtgcctcacagcaccaccgtgtggcttcccctgggactgcagccgcctaactgggtgtggccctgagtgtggagctggctactacaattcctttgaatctgtcgatctaaaataagtgaaaaggccagaacctagtttagagagagtttattcaagcacacatgttgaggacaggcctacccaggaagcacaaattccaaagaatggaagtcagccttcctgttcgaaatgtaggagcttgggatcatttatccagccaaagccagacagagactctgttgcccaggccggagcgcagtggctggatcttggctcactgcaacctccgcctccctggttcaagagattcttgtgcctcaccctcccaaatagctgggattacaggcatgtgccaccatgcctggctaatttttgtatttttaggtagagatggggttttgccatgttggccaggcaggtcttgagctcctggcctcaagtgatctgccctcctcggcctcccaaagtgctgggattacagacgtgagccgccatgcccagacacctatgtatgtcttgatgcttagtcacaatgttctgattagttgaggcggtctttttctttcaggaaaggtatgtttaacattccacactgaagatgtaattgtccctgggtcttagatgatatctgatctgagttagtaaagaacaatgaaggaagcagttaaactataacagagatcagtgactggaaggggggctgtggtctctccggtcccttagttcaaccataatctaagaaacagaattgcaaacatgctacatgactcagtctccagggcttagcttcccccttggcgttttacaaaccctatggaactgctctgcccattgtgtgactgtgtttatatttaaattgaaattgaatataaattaaaattcagtccttctgtctcattagccacatttcaagtgctccacgatacctgtggccagacagtgggggtatagtctaaaacacctccattggtgtagaaacttctatggacagcattgctttggcctgcccttgggcgtgttttctactagagtgttcatattgaggctgttttcatctcagaagagtagtgttcttcattaattaggtgccaaattgggggactaacaaggtcagccacctgggtgaccagtttgaccacaggccacagggccccgtttccctccaggcctggaataggcaccccacaggctgcagaagaagcctggtggctgcctaggaggaacttgtagcgtaggtggaggccaggaacactttctgggacctgaggtgggcagggatcgcctggtcggaggggcccctaagggcatggatggggccggactctggcctggctgtcaacaagagggctgagcctggggaagcaagtccctgttttcagtaccacctgcatcccccagggcagcatccttgactccccttctgggccagtgctgccctgctttctctgtctctttcagggtgtgctgtccgacctcaccaaagtgacccggatgcatggaatcgaccctgtggtgctggtcctgatggtgggcgtggtgatgttcaccctggggttcgccggctgcgtgggggctctgcgggagaatatctgcttgctcaactttgtgagtggccacagagacaagagtgggataggatgcaatggggtacaggctctgctgggcaggattatatgttacctggtcagagcaggtggcagctcttaggagcctcccctaggcccctgcctgggagcaggaggcagccatttgcactctactgtctagagaagctggttcctcccagcaggagaattaggtaccctctggtttttagccctgggtgggaggagccagctgcctataggccagctctactccccgctcctttgccttttatcttccttcagaaattctaaaagaattgtttgtctgctactgtcctttgcccttcctggctaagatcaaaagatgttgcaagtaaccttaaatcatttccctcctccaaggatgtgtgagtctgttggatgtacaagtcagaatcccaaatttcctggcagaactgcagattactaagagtttagttttatatttagatacaaattcatgtttagatttattcagttaaataacacctggtggggaaaacacattatcatattttgcagtatattgtttgttgacttcattagatcaagctttctttttcttggacataattttaaaagcaaaactatgggctttttgtcctaattttttctctggaaaaaaaaaagaaaagctatgtttagcatcttgcttttatatgaacagagattacgttttggcaggccttgtgtgcatatgtgtgtttcctttttcttttcttttcttttttttttttttgataccgagtctcgctctgttgcccaggctggagtgcagtggcgtgatctcggctaactgcaagctccgcctcccgggttcacaccattctcctgcctcagcctcccgagtagctgggactacaggcgcccgctaccatgcctggctaatttttttttgtatttttagtagagacggggtttcaccgtgttagccaggatggtctccatctcctgaccttgtgatcctctcgcctcggcctcccaaagtgctgggattacaggcgtgaaccaccgcgcccggccgtgtgtatgctttttcttactttgaaagattactccaaattggccggttgtggcaagctgcttagtgtcttatatggccagtgataatgtctgtgagagcgcagactgcaggctgggagtctgccctgatgggatgtggacctgtggctgcactggccccttgcagaatgccaccactgcttgtggcctggggcagctgagcttctggaggggtctttatgctgacgatcatatactttcatgcagagttggtacagataacattggcacttccagaattgtaaagagccctgcagggaactcacatgtcctgcatgaactatgtgacctcaggcaagctatgtacctcgtgacatagccatagtttcctcatccctaaagtgaggtaacagatacgtaggcactcgatggttttgtgtgtgtagtggggagtcatcagataatgtcttgggcacagtgtctgtcctaaaggagccgacaccccaggatgccaccctggagggtccaggtggaactgctggggtaggacagccattcattcctgtgataggggtctcctccttgtccagggaggagggctgcttcatagcaagtgattgacacattggcttggagctttctcacactttttcacgcatttgagtgttatcagcaatgcagtgacatgggtagggataaatagcccctttttacagatgaagcgaagttgtgcagagtcacccagctaactctaagtgtggggttctggggccccgatgtgggactctcaggtgcagagcccacgctctgctgaggatggtggttctgggtcaggtggggttatgtgtgtgggggtgcaggctggtggggtggtgacttctgctcccgtccccttcccctgcagttctgtggcaccatcgtgctcatcttcttcctggagctggctgtggccgtgctggccttcctgttccaggactgggtgagggaccggttccgggagttcttcgagagcaacatcaagtcctaccgggacgatatcgatctgcaaaacctcatcgactcccttcagaaagctgtaagcacctccccagcgggcccccgatagagcatgcacctccctgtgctgcctggagctgagtctagcaggggcatcaggccttctctgtgggttgtctgcctgcagcttggcagacagcagggaggccgtggaacaagccactccacctctggtctgttccactttgccggcttgtggttgcctggtgggccagccctttcccattgggattgggcaggcaagtccagctgtacccgaggccacccaccccccacgtgcccggccctcctctttcggccccagatctttccaatcctgcccaatagccataccagctgcaatcctccttaggcgctgcataccgtaaggcacagcttcttccccccggctcatgactcaccatctgacgctattcctatccccttcctccccgggaccttttccccttcctccctgggaccttttccccttcctgtttaagaagccagggctgcctggaggaagctttgtcagatctagtggaatgtgacctccctggaatatgtgcccaggggtttgtctaagcagttccaggctatggcctttactccatctggtccccatccctcttatctctctcatgtgtggctgcacctggacgcttggaccatagctgtcacagccccctggggaggaacccactccttggccatgtcagcctgtgcaatgcaaggctcttgtttgatctgtgtgctgacagaaagcccagcttccttaagaacttttcatgtggaacactttggttttgagaagaaaataaatcagaaaccattaaaaatctatgattcactctcattattaaccaaaacttgttcacctttatttcatgtattatgggatccagcaaaacccatttatgggaccaaagaccctgcctgtattgttattactaatgtgtattagtctgtgaaagtcaccaaatccccgccatgttttgatgcctctcctttcttttctgttcagtgccaccgtccttttttcattttcacgtagccttggcttgcctggtctcagcatgctaggttgcggttcatccctgcattgccttaaaaacatagttttctgcattgacttctttttcttttaaaaataaaacttctggccgggcgcggtgactcacgcctgtaatcccagcactttgggaggctgaggcgggtggatcacaaggtcaggagatcgagaccatcctggctaacatggtgaaaccccatctctactaaaaatacaaaaaattagtggggtgtggcggtgggcacctgtagtcccagctactcgggaggctgaggcaggagaatggtgtgaacccgggaggcggaactggcagtgagccgagatcacgccactgcagtccagcctggtcaacagagcaagactccgtctcaaaaaaaagataaaataaataaattaaaacaaaacaaaacaaaacttcccaggggagggattcagtaaattacagagcttccttggagtgaaatttcaggtaatcactaaagcaagtggaaccgtggaggtgtgggggagacaattttacctgagaagtaagcaaaacaaaataaccaaccagaaatcactgttgtcatttgttgtgattattgccataaccatgtcagctgtaagggcaaatgcaaagaagttttttaggggaaaagacactgtcaacttcacaatgatgctttcagtgtttggattttacacactttttagtcaaataaggattttctttgtagccacaccagatgcgaggaaggggagggcagaggccccaggtgtggggcagagctttgattgtgttacctttcaccttcatcggacctcttttcctcaggagcagacacttagcagctgttttttgtaaaggggtgaaaaggggaattcacttgcaagtttctcagggaggaagaacactgcacactaggaagtgttctcttgtggcaagtagaggaccacaccaaggtgccgagggggccacaaaggagaggacgccactctcctgtctgaggaggctggaaggaggcgtctcctttgaggaggctgggaagaagagcaagctccctgctaaggagggccagggctgggtatgttgtgcctggcagtggggccagagggctccactgagccagccatgtgggttggacagaggaggcaccgtggcccggagataccttcactgccatttcctttttgttattattttctttaacacatcaaaagggcaggtcctctctctctctctctctctctctctctctctctctctctctctctctctctctctctctccccttttttctttctctccttttctctttctctctctctttcctttctttctttctgattgggggtgggggtcttgctgtgttgcccagacttgtttccaactcctgggctcaaaccatcttcccacctcaacctcccgagtcactgaggttacaggcctgagctactacgcctagctgttttcttcttaaagggctgcctgggttgccagcttagcatctctgcacatgggaggtagggggcgggccttgatttctctgcatggtagatgccggcagacttagcctggcatcactatgaatgatgccctatgctgggcagccatggccctgtcttggagcccctaacagttctggcttttgtggttgcagaaccagtgctgtggcgcatatggccctgaagactgggacctcaacgtctacttcaattgcagcggtgccagctacagccgagagaagtgcggggtccccttctcctgctgcgtgccagatcctgcggtgagttggcttgtgctggggcacagggagcccgcccttcctgaagcccagaagctttcctgactcctccagtgctctaggatacttctctgtcatggaggtctgaggagcaggtgtgctttctccacaccctcctcaaggctgcctcagctctgaaatccgatatgtgtacattctaggaacactgcttgcatgacccaccctggccttggtgttctgggtgaggcaggagaaaaacagtattatttctacctggagggctgtcacttgcagctggccaagagctatgagtgaaataaggcccgcttatccctcttccctgtcctttttctggagcagattcctagaactcaacagtgcacgggggctgtgggtacacatcattaactggggaacagtagtggagaattattttctttctttttctctttcttttatttttgagacagggtcttgctgtgtcgcccaggctggagtgtagtggcatgatcttggctcactggaacctctgtctcctgggttcaagcgattctcctgcctcagcctcctgagtagctgggattacaggtgcacgccaccacacccggctaattattttctgtttgttgttgttgttgttgttgttgttgtttggttttattttagagacagtgtctcactctgtcactcaggctggagtgcagtggtgcgatctcagctcactgtacaaccattgcttccccgggctcaagcaattctccagcctcaacctcccaagtagctgggaccacaggcttgagcaccacacctggctaatttttgtattttttgtagagatggggtttcaccatgttgccccggctggtcttaaactcctgggctcaaagcgatctgcccatcttagcctcccaaagtgctgggattacaggtgtgggccgctgtgcctgtcctgtcctttctttacctattggcattcccaatccaaggccaacgtccttgggttccagaagctgggttcttggggtgaactgtgaaggagctctgaattttgcctgaactgagcctgagtagaactgggccagttgccagctctcggtgcagttatgcaaagcctggtcctgggttacaggctttgagaaggcagagcatcaccactattatatgggcaagttctgcagcccaggagaggctcagatttgctgaagctgcacagctcttctgaggtctccactgcgactgtgaaatgtaccagtcttgtaagtgttgcttttagcacatatagttcttacctccaagtataggtcttacctcctagcaaactgtggcccccaggccaaatctggcttgctatttttccatgacctgtgagttaagaatgcattcagatgtttttaaatggttggaaataaatcaaaagaagaataatattttgtggtacgtgaaaattatatgaaattcaaatttcagtgtccataaagttttcttgaaatacagccattcctgtttgtttacagattgtcagtgccggctctcatgcaacaaaagcggaattgagtctgtgtctgaagtactcactctctagcccttcacagagaaagtttgccaccctgtcctggtctgaaggattagttggtggcatgattgaaggacatgagctgtaatggaatttgcacaaatgtttgctagtgtttggttgtgactttactagagcctcttagcaccagcttcttgagacgccagaagcaactaatttttctgcttttcttgcagcaaaaagttgtgaacacacagtgtggatatgatgtcaggattcaggtgagaactcccatgtatacaacttgaagagttctttaggttttattccctgtggttcaacattctgatttagcacgagtgcaaattgaagtgggaaaactcagggcagtgaagctcttgatgccacctaagctgagcataggcacagggtcacatacactgcttcctgagctggcggcaggactcctgggagcagtaatggtgattctaagccttgtgagctgcagtcccaacatctaggagttgctgcatttaaagaggtgggatggaagttttgagggacaaagactgcatttttaggaggctccttggcatcccagaagacgtctctcgttaaggggacagctgcaggagtgtaggtgccttgttctggcctccgtgtggaggcagtagtgacaaagagggaggcaggcctggggcaggggcgaggctctgtcctccaggacttcctttaggctgtagggagtgtgctcttagatgcaaagagaaggaagaccccaccccactccagtccttgttctagtggtctttggtgatatgaatgactgctgttctaaaagggaggagtctcgaggaatcttcagagaccccacctgttagccgtggatatgagggatgtgtccctacagcttggggaactgtcctcctttagggacctgcatttcacagggagaaagtgctgtaaactgaatgtgtgtgtctctccaaaattcacatgttggaacttaaactccaatgtgatggtatttaagaggtggggtcttggggaggggattgggtcatgagggcagagtccttatgagtgggatgagtgtccttatgtaagaggcccagagagcttatttgtcactccactgtgtgaagacacagtgagagggtgccatccatgaaccagaaagtgggccctcatccgacactgaatttgccagtgtcctgatcttgaacttcccggcctccaggactgtgagaaataaatttctgttgtttataagccacctaatctatagtattttattctagttgcctgaatggactaagataagaacctatatcaacatcagcttccctaattatgattttttttgccacttatattaatttgctaaggctgctgtcacaacataccacagacagaaatttaagccacagcaggcatttattttctcacagtttggaggctagaagtccaagatcaaggtgctggcgaggtgaggtgggtgccttcagagggctgtgatggaagggtctgttccaggcctctctcctggctgcaggtggctgtcctctccctgtgtcctcacgtgggctcccctctgtgcatgtctgtgtcctgatctcctcctcttagcaggatgctcttcatattggattagggggcaccctgatggcctcattttagcataattacctctgtaaagagcctgtctacaaatacagtcaccttctgaagtcctgggggttaggacttcagtgtatggattttgaggacacaatttagctcctaacacctctaaaattaggggctaatactccatcatgttgccatggaggaggctgataggtgtgagggggctggggccgattgccctgtgtggggtgggcagggctggggtgtgtgctgggatggttactgacaccccaccggggttagcagtggagggagctggttggctggcgactgttgcctgctggctctgtctcctggagctgagcttactggtgggatgcccgctccgagaagcacccttcttctcttcttaggagactctggacccccttctccaggtttctctccctttagaggcacattttcctccaagccttcaagccccttctctttctccagatgtggatggtggggaagggtatcttgagaaagttgggctttaaatctctggagacctgaaaggaaacagccagggagcctttggtcagacaggtggtgcgatggcacagtgcccagcgaggggcagaggctgagaggagctgacgagcatctcctggagagtcctccttgcctgcctcctggatccctcgttcccaccctgctttgccctgctccttaccagagctcactaggggatcaggtggggacatcgtgtgtgccaaaggctcagacccctgtggtgttttcctgcagctgaagagcaagtgggatgagtccatcttcacgaaaggctgcatccaggcgctggaaagctggctcccgcggaacatttacattgtggctggcgtcttcatcgccatctcgctgttgcaggtgtgtcccaggagcctataggattggcaggtggccttttttcatttgagattgggcccttaacatagagtgcatgggtccagtttgggtatggtattaaggaagcttgcagaagaaaaaaagggattcaactggatgtccaaggctgagagagtgtatgcgtgtaagtgtattggggaggagaatggtggcttccataaacgctacctataggggggccctctgggcgggggcaggctgggaggggcttgtggccctgcacaggtcctggtggcagccctctccagagggcccaatgggctgcagaagggtcactgcctatctggaggtaggtcaggagtgtgctcggggtgggccatcaagtgctgcagatggggaggtgaaacccttggtcacctggggcctgagggtggcctgaggctcacgtgtgtgcacttgccccaggacctctcctcctgtctctggcccctgggctggagttgtcaggtatcttccctgtccatgagacatcctctgaggcctgctgccgtttgtggcatcctttcctctcccaggctgtgcttgttcatttgaaccaggttgcacatgtgggaggatgttggtggctgagcaggcagtgaggcctggggtgactgggctggttggtgactgctaggagaagaactggcagagaaagtcaagaattcagtgatcagagaaaccaggagtctttccagtgctgttcagggcttccaagaagccgcagcttctgggtccactgatgcatttcttgtgtggaaaataacaccatttagaaagtgtttgactctgtttttgccttgaagagggtgactgaggtagacccagggccaccagccacccacacatgccttcctccttcaaggaagactaagaaataggaggaagcaactggaaaaggaaagaaaaaagttatttgcaaaataggcaagggaagaatcagacttcagaaggactgactagtcaaattagaaccacacaagaatttaaagggaaaaaaagccatttccagaggtcaccaagttcgtgttcatctgttcacgttagaagaacatcagtctcctctcatgatttccctgctcaccaaggttgggatggatcttcagacattattagcacagccaaaattggggatggccttggttttattatggaatcgacgtttacaggaaacattcaagatttattattttgggaatgagaaccagtcagcgtgaccctgttatttttggtttaacccagggacaggcgtgtcctgccccatggcttgtgacatacttaatcatgttggaggcaggacagagtgtctgttttgcttgtggtgcctgtggtttgcctcttctaggctttgggaatgtaacagactagaccccaggaccccttttttgcgggaggggtggctgtgctgtgccactcgctctgcggtgctgtctctacgtcttcagtcgcagctggggggtgaggagaggcgtgcagtgggagctcccaaccccaccctccgctccctgccctctgcctttgggccccagcaatggccgctgactctgctggtgttggtttcagatatttggcatcttcctggcaaggacgctgatctcagacatcgaggcagtgaaggccggccatcacttctgaggagcagagttgagggagccgagctgagccacgctgggaggccagagcctttctctgccatcagccctacgtccagagggagaggagccgacacccccagagccagtgccccatcttaagcatcagcgtgacgtgacctctctgtttctgcttgctggtgctgaagaccaagggtcccccttgttacctgcccaaacttgtgactgcatccctctggagtctacccagagacagagaatgtgtctttatgtgggagtggtgactctgaaagacagagagggctcctgtggctgccaggagggcttgactcagaccccctgcagctcaagcatgtctgcaggacaccctggtcccctctccactggcatccagacatctgctttgggtcatccacatctgtgggtgggccgtgggtagagggacccacaggcgtggacagggcatctctctccatcaagcaaagcagcatgggggcctgcccgtaacgggaggcggacgtggccccgctgggcctctgagtgccagcgcagtctgctgggacatgcacatatcaggggttgtttgcaggatcctcagccatgttcaagtgaagtaagcctgagccagtgcgtggactggtgccacgggagtgccttgtccactgtccccctgtgtccaccagctattctcctggcgccggaactgcctctggtcttgatagcattaagccctgatggcgccggtggcgcggtgggcatggttcttcactgagagccggctctccttttcttaaagtgtgtaaatagtttatttataggggtaagaatgttctcacaccatttcacttcctcttcctctcctccagcattctcctctgagcagccttagatagtgtccatggctggagccgaccctttgagtccccttgagtgtcttaagaaccagcccacaacagcctctctttctcctccacatactgcagcctccctccatgcatcccacatacaagcactcccccactccccagcgtggcctcactgtcttctggtcttggtgctactgaaattgtcacccagaatttgaatcctgaccctccccactgcaagcccagggagccccagcccaagatggccagcctgaaactgttggccagggctcctcttgtggccatgtacccagggctggctggcctgccatttgcctctccccggagacagccgttcttctgcaaccacaccccgtgcctagccacaaccccaggctgcagctgctcagaagctccaggcattttgtttctggtgaccgcccctaatgggatatcggtgatcactggtccacccttcctgtcagggcttttctggggctgctcttggaaatgaagtcttaagtactgaataactcccctggggatagctggggcatttgtctagctgggctactttctaacactttgccatagctcagaccacttctcatcgttcagggatggactgcaaccttaatttacttgccggagtgtacattctagtgtggtgtatactggtggctgttgatgatgatttttttttttttacacaattctctgtagactaggagaagaatgcttgtgtttttcggaagtgtgatgcttctctttgactgccaaactcttttatggaatatatctttatattaatgctgttttggtcatttttgtttggggtcactattgagatattgctaagcatctcagtggtaaacgcggctgccagaggaaccaagggatagggtatgtagaccttacagaaggatggatggtaaaggcagtccatcatcagcacaatctgacttacatttcattgagtaattttttttttttttaagattctgtatggcagcactttcagttgcccttgtgtgccggccacagccgcacaagttggcttgtggtttatcccccgctataagtgagagctggagaaacttcaactccataggtctagaggaaacattgttttaggttatttctgtccacccctgtgcgatactatttattgatccaagcagaagagcttggggacactgagtcgaagtggggacatgggattgaagcctgggcactgctgctgcatgagctgtgtgtcctgggtgtgccggcctttctgtgaagggggttggtggcagtgcccacctcactagatgcctctgacccagcctcccctgggggagtgggtggccacagaccctccctgccagagctcctggaaggctcctgcaggcctgacccatctattcctgtagacctggtttaggatgaagtctcggtgcgatttttgcagagttgggtttatctttcaactatagacccttctggctgttctcagccatatcatgtgactctgaatagttggatgaggaatggaaagaaagcaaggatgagagccggtcacgtggcagtctccgcccagcatcggctgtccgcacagaggcacagggcaggcctcctgtgcactccccacctagcactggcctgtcctgaatccccgccttccctggttggaggccagctgtggcatttgcaccctcttctcacctcaccatgcacatgctaactttaaagccttggggtctttcctgtaccccctcctcaaccctggtccaccccctctcaggatcttgtcaacgttatttttcctgtcccgtcttcctatcgctggccttcctttcccatcctaaaaacttgccgaggccctatggctccctccctttctttcccaggcagcttcttatctgggctgtctgtaccccttcctttgcaccacccaccatgccccacgtagctgaaagctgcttatcccaattgtcaactctggccttcttcagcctctgtagcaccagacactgcacctcctgaatgtcctctgcttctctgcttcagaggcccaggctcgccagttctctgacctctcccatatgtctgcttaggactctgctgcagctgtcctcaccagcctccggggaatcccactacccacagggcagggctgtgggctgggctgaaaaaccatctgcatggtccacaagaagcctggcactgggtttccccatgaataacaatgaaaattaatggatgcacaaccttcctggaacgtggaatttctctgggagattccatgcagaggccactggggaggtggcaggcatgcatgtgactgtaggtggctgcagtgttggaaggctcccagcagagcagagagggtgtcagtctcatcagggaacccacctgatggcttctcagccagcagtctcagaggaacatagacgactgctgagaaaggagggaggcagcagtggtcccagcacctgaggcatcctgctgtcatgggaaggtctccgcccaaatgtcagatgcatcagcctgtcacccgctggtccagagctttcagctgtactggtagggggtgggtggtggagtgctgaatgaccttcacaggtgggcctttccagctctagggtcttacgggtgtcggtccacagaaccacggtttttaggttgtgtgtccggggctatgggaacctgtcccccatgatggatcttggtagagacacttccctctgtcatcgtgcccaggaggatgctgcaggtgactacctgcagccctgttctcattcatttggatgccctccagaaatctggggagccatacacctttagagccttttttgctccttatcaagttggcaaggcttggccaattcctgttcaaggctgcattaaaggcatgttcaccatcctggctaatacggtgaaaccccttctctactaaaaatacaaaaaaattagccgggcttggtggcgggtgcctgtagtcccagctactccggaggctgaggcaggggaatggtgtgaacccaggaggcggagcttgcagtgagccgagatcacaccactgcactccagcctgggctcaaaaaagaaaaaaaaaaaaaaaaaaaggcccgttcattctcaaatgcttttggcgtctccagggtgcctcaggaaaacatgaagtgggcattgtagaacttggggctactgtgtaactttggaagaaaaagttaagggtacttttaagtggatactgttttgatgaaattgccaacttcagggagcccagcttggagaaggaggacgtgagtattccttacaaggctccgaaacaattctttcttcacttagttttctttctgtgctctgcatcttatattccagcagggtcttccaatgcatggtttaataactactagaactggccaggtgcagtggctcacgcctgtaatcccagaactttgggaggctaagacaggcagatcacttgaggccaggagttcgagaccagcctggacaacatggtgatacccagtttctactaaaaatacaaaaattagtcgggcatggtgatgtgcacctgtagtcccagctgctcgggaggctgaggcaggagaatcgcttgaacccgggagacagaggttgcaacgagccaagatcgagccactgcgctccggcctgggtgacaggagactccatctcaaaaaataaaattaaaaaaaaactactacaataaattatcaccttggactgtataaaacaacttttaaactagtctttttaaaaagtacacttaaataaaaatctaaacataagagaatgtaaagtgaaaagtgaaagtatgtcttctgttacgcagaggtaactactattaggaatccttcctgaaaatgtccatgcatctactcaggtcatcacacccatggaatcattttacatactattttatgagtgttacttaatatactgatccacagtgcgttttcacggtcacgccatcagttgtaggagtgtgccaagaacagatgggccttgcctttgtaccagaggagtccatttacagttgcaggtaatagaaaacccaattcagactggcctaaacaatgaggggaggttttggctcttgaaactggaaagtcccaaggtggggtgagtttcaggtttgggttgatccaagtggctcagtgacgtcaacaggatcttgtttccatttctctgccttccacagcctccccttcatctatggtggagggaaggagtctaccacagacaaaccccgagcctccccctgatgggtggtgtggtggtgaagccagcaagggaagggatccccggacacacccctcctcatgctttatcccactgaaaccatgcggctgtgaaatgcagcatcctccaggagggggatgaaggccggggatgctgtcagctattgccattgcacttctgtggatgggtgttacagttttttgcagggttttgcacttacaaggacatatatatatatatataaactacagtgttattggaattgcttcttacagtttgtaagaaaaaaacatgtttttagaggagttctcctgggaggtgggatcacatttttttttttttttttttttgagacggagtctcgctctgtggcccaggcgggagtgcagtggcgcaatctcggctcactgcaagctccgcctcccgggttcacgccattctcctgcctcagcctcccgagtagctgggactacaggcgcccgccactacgcccggctaattttttttgtatttttagtagagacggggtttcaccgtgttagccaggatgggggatcacattttaataagtaggtactcagggctggggtgtacctgttgctgcctgaccactgctggtgtgtgtgggtataaggtgacaaaacctcctacccctgtgaggttgtttcaaggattaaatgagttgagatgggtaagcatctaacaaagatccagattatttagtatgcatcccctgaattattgctaacataattttaatgattggggaattttatctgtggctgccagtccctacgagagagctgcctgggtcacatgtcagatagctcaagctttgaatcactgaaacgaaacggtccacttccctgtccctttaggaacaaggcttcgaggtctgtggcaagcctcagcaggcatttggagttcaaggtctgttctctttctgtgccatagaggtggggagacaaggtagggtgttgcttcttgcctggagcgcagatgctaccagaaaccaacacaaccaaagttgcccgggagcccccagaagcagcagagtggcc

SEQ ID NO: 644 - DNA, 27292 bp, Homo sapiens
  source 1..27292: mol_type = genomic DNA
actcaggcaccgtggtgacagcagcaccaagggacaagcacaggagaaagacgcctcccctacaaagcctgatgagggtggtcagcaagtctaccctgcatttctttttctgtgtgtgtgtgtgcgtgagacggagtttcactctctcttccaggctggagtgcagtggcgtgatcttggctcactgcaacctccacctgcctcccagactcaagcgattttctcgtctcagcctcccaagtagctgggaccacaggtgtgcaccgccatgtccggcgaattaaaaagatagagccaggcgcggtggctcacgcctgtaacctcagcactttgggaggtcgaggcgggtggatcacctgaggtcaggagttccagaccagcctggccaacatggcgaaatcccatctctactgaaaatacaaaaattagccgggcgtggtggcacacgcctgtagtcccagctactcgggaggctgagacaggagaattgctggagcccaggaggcgggggttgcagtgagccgagatcgcgccactgcactccaacctgggcgacggagcgagactccgtctcaaaaaagaaaaataaaataaaataaatttctggagatcagggtctccccaggttgtccaggctggtctcgacctcctgggctcaagcaagcctctcgcctcggcctcccaaactgctgggattacagatgtcagccgccgcgcccgcccgtcctgcagcgaggtttgcaggacatggggtgggcctgggggcagagatgggaatagggcggaggccaagggctttactgcgggtgacaagacgcctgcgacccgccaggccacctagaatccccaggacaccactggtttgaagcccaactccgttctcttccccagacttcaggggataaggttctcccgaaagcagatcacagagcggggctggagaagccgggcctgaagctgctcatggggcgctggcctcaggcagcgctgcgcctcccgccccggcgcgcaccccagggcggactcagcccccagccccggcccgcgccccacggcggactcagcccctagccccggcccgcgcctcacccctcggtgtactcggcctgcagcagccccaggtaagcctcccacttgttgccgacgatcttgccacaagtgaagcagcgtacagggatgatcatggcggcggcgcgtcccagactgcccggcccggcccggccgcacgcgaagaacccccccaggccccgccccgggcgcgtccactgttgcgggagaatcggctccgctcgttctccgctgttccggccgtccctccaccggccccgccaccgctggccgcagtttccgccgcgataggggcttcccgtgcgtcccggggctcctgggcctgtgcgtcccggggctcccgggcccgcgcggccgcggcagcagcagaccgcacacccccgcccaccgtcttggtgcatcccggcgctacggcgtctgagcagggccgtaaagctgcggcggcggttcgcgtttctcgtgtccgcttgactgacagctgcgcggcgggagcgggcggcgcgagcgggaggcggcggcgcaggtactgcgcctgggggttgtgggggcgtgcggccagggtcccgtggccggaggtgtccgaccgggagcggctggagccggacgcgagcggggcgcgcgagttcgagcccagagccgacacgcagcaacaagtggggtccggcgcgggggctcggggagagggcgggcgggggccggggcgggtcttcctgccgcccctcctggccgcgccgagtagtgggttcctccgcctcggcctctgcccgcggggtgtccggggctctcggcgctgagttcgggggtcccattctggacgcggcccagcccctaggggcgccgccctggcctcagctgcgcaattacagcccccgccggcagctccccgccccgggctcctgtccgcgttctttccgctctttcccgggaatggggtcggggtgcgccctcccgggtcccggctctgctggctgctcgccgtcccgagctcccgacgctcagacgcgcctctgagcacggggagaggggacccgggagggaggtcggggagggagtcgtggaagaggtgctttttgagctgaacctggaagaccccggcacaggggatccctgggcagactcccggaggctgcactggcaggaccccctgaaggcctcagctctggcttgccctggagctcagggcctacggacgacgagggacgaggagcccgtgtctctcggatggagtgcgggggggctggcaccagcacccttcttgctgtgcccctggggtgggggtgaggaaatggggggtcggtgtgcagtgagaggcaaagaaggctccttggaggtgcgaggtgggctgtgggggtgggtgggccgcaaagcggcacccatggggggctctgggctggtttgccggcctggggcttctggctggggtgggacctgtgttgggttccaggcatcagctgccgctttctcagggcaatgctgcgtctgccttagttgcagaggaggaggacgaagggttttctgggtccggagtggtgctagccagatccactgcacgcttggggtttccgctcccaccctggccagggccctgggcagcttccccagtggcatttgccataccccacccagccacgtgcggagccacgagccgaggccacttcccttccctgaccccctccccccaggatgagtggacgcacatcctgctctgggcagaagggcaggacaggggccctgagtaacggtggcctggggtcagagccaggttcagctgcgaggctgctggtggctgtggaggtgaggggggcaggggggtcccggatgttagcagggtgggccctggggagtgggtgggggcctggaggcttcttggaggagggtccagggcctgtcccgcccctgttcctgcctgcaggagttgtttactcagagcaaggggtggtggggagtgagctgctctccaaatcctggcttgggccaagctgacattcttggaattccgagtgtgtgcgcttcctatccctccatttcccagcagagcccctgagatctggagactgccccagcctcaggctctgtgcatctcccccgagcccccaccacatatgtgcggaggcccctgggggcccaggcctgtcctcagtcccgactgggctctacctgaggaccctggggagcctgggcctggccctcctcaggcaagcgggggtgggagggagcctggtggcggggcagggcactgtgcccgccagcaggggcgggtgggggcccctctctcctgggtgtggagtgttggcgcagactcggcctggcttctgggggggggggtctgggatggggccaggagggtgaggcgctggttttatagaagggggcgttgtggagcctcctgtggtcagggcagggcacagggagcagagggtgggctcccccggctgcttcctgctagaggagggatcacttcagggcaaaggaccaggggaaacccatgattgaagttttagctgctgacccctcccaccctgggtgttgccctggaaacaggccagccacgggaccaggagggctgggagggggagcacgggctgagccctggctgggattcagctgaacttgcactctggtctgggatcccagcccacgtttccctgtctgtaaagctcaggtgggatcagaaactgcccgcccggagggctgcatccctcctgccgctgaggctgggcatgaccttgactgggagagggtgttgaaggtgtctgtccccagcctcgcccccacacctgtgctctctggccctgtccatgcctgggacagatgtgtgctcacccccagggtgctgtgggatggggtgggtgcacacggcgccacgagcacacgtgcccgacacctcagcggtgcacacagccaaggccactgcccaccgtacccacgccgtccgtgtcctctctacggtcctgggagactggcgttgtgagcagtggggcctgtagatggggccgggtcctctctacggtcctgggagaccggcgctgtgagcggtggggcctgtagatggggccgagactgaactgaccctagcctcaccactcatatgtcggggctggtgatatttgggaatgtcactgcctgccatgcagctgcccaggcctgatgtgcccccccagactgttctataggggtctaggttgcaggggccagggccagggctgtggtgggatggcacctgaggtgcggctgctcctggagcctggggggtgtgggaaggtgccccccacccagggtcctaagtctgttgccttcacccccgactcccagcagataaatacccaacagtgcaggaaaggattacagggaaggcctggagtgtggggttagcctcggtggtcccaggaggaaagactgggggacctctggactatctgtccctcccctggggctgctgggggtatcagagtggtgtctccagcctccagggctcaggtttgggtgggaggggcctggtcccacccagactctgtatgtagcccccagtccctgctcctctgtgtgcatgagggagtgccagcttgcttgggaccccccagggtgagggcttgggacgggcactggggccccgcaggggctgaggcagccaggaagcccacagcataggctgtttgtgttggcgggcctccctacctcctcaaagctgcctcagagcccgtgggcctggggggccagggtgtgtgggcttggctctgctgtctgtcctgagctgcccctgctgagctgtgtggagaccccgaggtctgggctgggccaggactgagctgctgccctgctgctggggctcagagaggctgctccacgggcatggcacccaggctgctgcagacaggctgctttatcatgtgggcaggcccctctttgggttggacctccgtctggccttgtgggtgtctgagatctccttgcagctcagtccccagggcttttccaacctgcagagctctggatgtctcttttggggctctcgctcagccagggttggggtggaggctctatggttccctcctgcccttgggctactggaaggacagttacctcactccagagagctagttctgaggggcgaggtgttgcggggttgagccagcagggcagggagtagtgggcactgcgtttggctgcccaggtgggtttggggcctctccctggccagaaatccctgagtgccaggaggaggacagactccccagcctggcacccatggtggaggagggccttgcgggtcattgctggcagctccatagggagggcgtgaggccccttcctgagcctgggtgtctgctcagagcccaaggcagggtggggtaggggtgcttgtgcctggtaggaagcagacagcaggctggtccaggggtccaggaccccagggaggaggcactgctgcgtgtctgtgtgggtgcaagcatgtgtcttggcctgtgtctctgcatgtccgtgctgtgagtacgtctttgaacatgtgttctctgcacaccgtgtctctgtgagtgtgagtctgtgtccctgcctggctgtctcagagccctgaaggagcagaatttggtgactcagtcattgattcagagctttcctggttggggctactcctcagtggtcttcttctccgagtctggtggtgtatcccctgcccaccccgactgcccctctgccctgtagggacctggccccaggtgggggttccctgcccttctctgggagcatctctggctgtacagctgagggtggaagccagggctccactctgcccatctttccttttgcagagcttggggcttccttggtcgcacccaccacctgcctgcccactggtcagccttcagggaccctgagcaccgcctggtctctttcctgtggccagcccaggtatgtcagggcccggctgggctggatggttgtggtgggcagcagtgggcttgcctctgggtctcactttgccagcccaggggccttgccagcggacactttgacaccacacctgagtatctaattggagctcccgtggggaggggctggactttggagacagggtcccagaacaccccgactggggtgttgaaggaccctccccgactgagctctgacactgtgccttgcccgggcccctgactgcgtctgggcaacccagtgtgaatcttgaacttggcaacagaagcaagcccagctccccgcccccacccccccccaaccccgctcctcctgaccctcggtggccttgtgaggtttttgatttcttcttgaataggcttcatctgctcacctgggcgatgtgtgcagagctttgtagatgggaaagggggtgggaggggtcttaggggacactgggactgcatcctgggcgctgggctcagtgcaggcacccagaccagctctcccttcgccctcccacccgcctgggaccctcgagccttgcctgccacttccccttccacccccagccacagagggacgcaggggagatggggcaggggtgccactggctagcctggcggcggatgctctccttggggtggctcgggtggtgtttttgactgcaggtggggtctggcttctcccagtcagcctggggtcctcccgggtccccgtggcacctgcccttgcctggcccacgagtaggtgctctgagcgctgcccaggtcacatgtgagctccctggaggcgctgcacacggctgagtgtctgccctcaggttgcacctgcgtggccaggggaagggggccgggcgccatctgctctctgggcagagctgcgggtgagggtttctgtcagggttggggtcccagggctcctggggtctctgctgggccccgatgcgtggccgccgttctgacccattcctggggcccagacccaccaaagaacccccaggggaaggacagggtaggggccatgggaagccccaggatggccttgtgggccttcaggggacctccaggccagcctcctgttctctgggggccccctgtccccttcccccagcgaggacctgggcatggggtgctgccctggggcttgggctgcagttctctacagagcccttggggggcagcagaggcttggggcacccagcccaggtcgtcaggggtgggcagagctgcgggacctccctgggcacccggggcttccacggcagccctccccagacctgccacctcccacatcagtcactccaggaggacccaggcctccagagctggtcagccctgccatggagcacccccttcccctcccttagcttcctctccctcctcttcctcctgcccttcctcattccccacctctgggcttcaggtcatctgccaggaatctgggccacgtgctgatatcttcccaacaccgcagggcccttgtgccctgtggtggggctggggcttcagaggcgtggggtaggctgcagggcacagctgggggcctctgtccccatctccggctgtgggaggtgtgtgcgcatccggcgtgatgacacccaggagtgcaggcacatctgcgcacggggccggtatgtctgtacctgtcaaggggtggggtggggtcttttacaggctgacttccagcctgggctggagcaaaatgaaattctgggccccttgtttaaaaattaccaagaatttcaagacgggaacagcagagcatcaagccagctggggtgggtgcgcgcgactgcccttgaagccggccccgctcccgcattggggacagcacggggcggaggccgagccgggcccacctggagcgctctgggtctgtcctggggctgccagcctcctgcggggctgcctggtggagggggggtgggtatctcaggaatcacacctgcgcttttctgtgttctggaacctcccatatagtcaaagactcaacgacacctgctccatgcagtgcaggctgacccagccccccacccgccgccggcactcagggcttccccaagggcgcccggggcggagccgcttcaagttgccaccagacagcaacggggtcaccctccatttgcgtagtgctttgagtatcgttctcgtggttggaggtctccaagcccggcccggggccagagtccgggcgaggtaccgtggggggaagggctgggggtgtcggtcgcgggctaagagctgcccaggtttcatccccaggccccggccccggcctccagtcccctcaggcgcccttcgcgagcatcttcctcccgcgcgcgaaggtgggggggctggggcgccggcgcgggcgaaggggccggggtcgcggctggtgcgttgccgggggctgcgattggtccgcccaggcggagcgctggggtttgccgggcggtgcggcgaggaggggaggggtccgcgcgggggcggagccgccggggattggccgggagggcgcggggcggggcgcgcggggtcgggggcgcgggggccgcagcgcgcgggccgggcagatgtttgggttccgccgccggggtccgagcggatccgcgcgacccgctgccaccgcgggggccagagcgggagcaggagcggggccggagcaggcgccggccggcgggatggggcgttccggggcggcgggtgcggggcgctgagcggcggccccggcacacccgggcgcgatgcgccgctccagcacggacgagtccacgtaccggcgcagcccctctccggagggcaaggagccggacttcgcgcgcggcggccccttccggcgctacagcagcctatacgggcgcgcgggcggcggggacgccgggggctccttcttcggcctgcacgcgaaccccggccccaaggcggcccaggcgcgctacacgtcgcccaagggcaacaagtacgtggttttctacctggacctctccttcatcttcctcctagaactgaagcgctgcggcatggcgcgcgcctgcctccaggccgtcaagtacctcatgttcgccttcaacctgctcttctgggtgagtccgggggccggggtgggggcccgggaaagacccggggtccctcccgcggcgggtcgcggggtctggggagtcggagtcgctgccccggccaggcgttgggtgcggttgtggggatggtcccgggaggacccaagaccgctgctccggctaggagcctggactgggcgggtggggaaggtttgcaccatcgcggggtccgccccctgcactcagagcggctgccccacgccctggtcccctctcctctcctctcctctcctcacttgatgagacgggacacgttgcacacgtgcgcgccggacagggccacccgggcactgcgcctctcctagggtcggggttcgagtccgggtcgtggccagttttgcgcggggccccggtgcctcctctgcgcccgctccctcctcggtgcagccgttatccttgcctcggccccgcccctccaggcaggcgacctgtcgggcccagggactcacttccgagggtttgagccggctgccgccaaggtcccccagtcgccgggaggcgctgcggaagggaatcctggacactgagcagggccgtgggccatcagtgttcgcgggagacactggctttcccgcgcctccggcagcagaggcttccctaacttttgcggaggtggggtcaggtgtgctcagacctgcagtggtgtccgggggggccctgtgtgctggatggagcagagctgaggtagagggcggacagggttccaccccaccccagccccatgtcagcaagaggtggggcaggattcccacctggccaggttggagcaagcctcatggagccgcgaccctgtcctgtccctggctcctgtggagggcagctgcagttgggggtggccgaggatgacctggaccgggcctggggctttgctggctgggctgggggaggtgaagtgataccaaggtcattctgtgccctattcttaattcctgaaccagctcctgcagctgggagtcgggggtgtggcctcagctcctgcctaggctctgggcttcagaaggaggctgtccatctgcataaggtccagctgggccaagtgcccagaagcctgggtctgccttcccacctctcccctcctgagcccaggctccttctctagccagcttggggtggaggcaggggggtccctgggagggacagccagcctgggttgcctgctgagtgtgacccaaggaggctcttggcccagacatccacctccagaaggggtcacccaagggtttgttttctgcaagaggctctggaggggtgaggcccaggcctgaggggcgccttggaggtaggggtggtgggaggtgtgggtgtggtctggagctggtgggtgtggggggtgggctgcaggtggctgagtgaccagagtgtttctgtgacggggggacggggcagaatgactgaagggcagtgggtgtgggggcccggcaggcaggcaggcaggtcctgggaggggaagccctctctcctctccaccctcctcctgtcctccgtggcctggacacctgccttcagggagaaagaagagggtcctttcccagggggggtctctctgctctgagagcagcccgccctcatggaggacccccaggtggacctctctttgctctgtgaaccccagagaagcctccattcctaccgcatggcagacacactcccccatcctcaacctgggaaagaacacacaaggaacccccttgggaccctattctgggctggaaaatgcaattctctcttttttatctttgttttttgagatagagtcttgctctgtcgcctggagtgcagtggcgtgatcttggctcactgcaaccttccatctctggggttcaagcgattctcatgcctcagcttcccgaattgctgggattacaggcgcgcatcaccacgcctgtctaatttttgtatttttagtagagacagggtttcaccatgttggtcaggttggtctcgaactcctgacctcgtgatccgcctgcctcgacctcccaaagtgctgggattacaggcggccccaattattttttattaatcaatcaccaccttcccgccagtccagcaaactggagccccgctggcttcatacaccagccttggccccccccaaccctgggctggtgcccagtgggggtctaagggtgggggcggggcaggggaaataagaatgagtgggggttttgccaggagagtctgtcccgggctgatgtccacgcctgctgtgccctgagtcactgtgagctaagccctctcctcctggcgtgaggctatttcaggagtcaggcctagcgctccccttccccagggctcctttccttttgggggtgccagccccctgttgtcggggcttttgccgcccactccatttcctactcgttgggagaccaggggatacaacctggcctcctcctcctcctcctccgtcttctcaggggcgaagttcaggggttaaggtggtgggagggacgtccccccggcgggacctcaagatccccgcgtgtgtctgtcctgaccccccgctgccggagtcctgctgggcctgtggggagggcatgggggagccccagtgggcagccagtgaccagagccgtgggcagtggtgggagccggggtggggtgaggaaagttgtgtgtgactggggggctgtgcccgtcctgggtgtggctgtgggtgtgggggcaggggctgagccctgtaagtggtacaggtgcggccagggcactgggaggggttggggggctgggagtggggtcccatgcctggctcgtgtgcggtggtcagggtgcagcttccctctgcccccagcttgcctggctgccccttagctttgctctcctgtgcccttaaccccagcctggcacccctctctcccacctttgcctccatgttctcctcaaagccccccttcttccaaatgcagaccctccaaggccctcacagtactcctggcttccaaggtctctttgggtccaggcctgagcccccctccacacccatggtcaggctagggcccctggtcactgacggcctggggcagcctgggggcctacctgggaggggaagggaggggctcgctccagaaggctgattgacgtatttctttacagcgttggttcggatttcccaggcaggcatctttgctggggtctgggagggtggggctgctggcaagagtctgtgctcagagcctccagctttgggtggagtggggagggttcctggggcagccagggtggggaggtaggatgtgtcctggcctggtggtgggggacccggtggggccttcagagttcagagcactggtgccaactcctaaccccatggacatctggggacatgctacctgccttcagcaaatagaggccctcacccggtgatggcagctccgctggggcacagccactgagccttcctttgagccctccctgcagaggttggggagtgggaagcaggctgcctgtggtggggccggggtgtctcctgggagcctcattccgggggaggctgggtgcagggcccgtgagcctgagcgaggtgtcctggtccaaggcaggtgccgacacagacacaggttagcaatggtgagggcgtggggggctctgctgccctgggacccccaccttcaggcctctgtgctgcctggtcagctcagctgctgccagcgacactcttcccctaatggaagtggaggtcccggggcggaggggagaggacggggcctgctcttcccgcctgtcagggatggaggcagccgagctatttagcaaggtgccaccacgaagggctgtcctcccgccctcctggcctcggctccttccagacgctgctccccagggtgggtgctgctcccctttctcttcacccgcagcaccaggagcttggtggaagctccggccgtctccgcactgtatggttagggcctggctgggggaccgggtgggggttggagtcccacctgccagtgcgggacgccgggcaggttctgccctccttgaggcctcattttcccatctgcaccatgtggggcggtagagggtgaggtccccatatactggcctggctcgggggttgaatggaaatgtgggaggcctctcagttccccaccacctgcgctgatccccggggagaccccccaggtgggcagtgtgagtctcggagccaggtggtccagggccccagcctggaggggcacgggggctgtcctggctctgcgctgcctgggctgtcaaccctggaggtgtgggggcccctcagcctcactgcccactctctgttgttccaaaggaaagtcctggctgcgcttgaggcctctgctctaagatcagcagtgagcctggtggagggggtgcagtgggggccagccttggcttcccctcccctgggatgagctgagacgatgtctggcagatggcatggccggcctgcctggcgctggcctctgggcagcacagtgtccccaagggtggcagagggctctgccttcagctcccaggcctctctttgaggagtttaacatcccaggccagcctttggatcaattgttcggaaacaatccgtttctgaacaaaggccctgacgctggcaaccacagcgtgtctgagccttggggagtgtgtggctccctgtgggtggggagcagcagcggtcggtcgggggacactgcctacccagctgtgggctccaggcagctctggtgctgttgggggtaggtcagacttgtccacccagtgacacaggcctggctccacggggcctctgcaggttccaggtcccagctggcggcagggcaggcaggccgggcctctgtgtggagagggctgtctctgggggcagagatgtggcattggcagcccagggctgcagggggcaggcagagaagtcaggaggcccacgcagggggacgggagtgagcgtgggggacctgggcttccagccgcgcttgtgcgatgtgagccgtggtcctggcctgatgacggcaggccacctccttgctgttcccacgcagccctgctgcacccacagccccgctgggtcacagtctcctcctggattcctgtgcctccagcaaactcctacccaccctgcaggagccagcattggcaccctgggcaggtgcccactgacgagggctgttctgctctccctgctttggacactggcctcagggtgggccttggtcactgggtggggctggtctcctcatctctgggccctggggtcccttggagagctcctagggtcaggggtgagggaacggaggacagatggggatgtggaaacaggacgtcgctcagggcccacagctttaaggaaacaaatcacagcgagccacacagattgtaagtggacagacttgtcatccctggaaaccagcatcccagccatgacggggacgttcccgccagcccagagggtcctgaggctgtgctggctgctagcatccctgtgtctggacagagccctggcccctgcagggacccagccccccatcctattccaaggacgtggctggcagcccagccatctgccacaaagccgcatggccagaggggcagtgggctgagggctgagagctggccagcgtggcccccgtgggcccggagggagcatactcgatggactccagtgactgcacccctgcccaaggcctacaggaggctcaagggggccgtcccgcagcacctgcccaagaggctcaggtgggctgtccagactggaaaagaagggcagagcagagaatgcatgggcctcagcagcacctgcacacgcccagcgctgggggacggccccccgagcctcttgggtgggtgctgagggacggccctccaagccttttgggctcctaatcttgggcagagccatcagttgctgctgaagatcagggtgagcgagtgtctgatggactgagcctggggcctggtatgctggacggacattggccagagatggtctcacgcaggtcctggggacaggttctgggcagtggacagtgtgagctgatgtctgggagaaggacaggccccaggcaccgctgactggaggtgaagaggtctgggacggagcccctctcctgggctgttcccccagctgccatcattcctagggttcctctccccagctgtcatggggcggggtcaacctcccacctgagcttgtgtctggcctgcggcggggcagcagtgagggagggaggctttcagcctattcctatttgtattgagcgtgtggggagggagctcctctggtttccgggtccaggcccagatgctgggtgggaccctgggagggtgcgcaggctgccagccacacccctagctgctccccatctggctgcatttgaccagagggacctggccctcctggcctcagccctgctcatcctgcttttgattttctgtctccaagctaatggggcccattttctcttgcgctttgaggctataattttcctgccaaaatgttttaaaagctgcatatgcagaaacactttcaaaattgcaggtaattttattaaccacgtgcacgcattttatctgtgtgggtctgccagcacgctggggcctcggggcccgggggacgccaggttgcagggcggtaacgcgcgcgtgtggccacgtgtgatggtgtgaggcgtctgtggcaacgtgggctgttgtctgtcacagtgtgtgtgaccgagcccgtctggtgacagtgggtgtctctttcctgccgtctccggtggaggtgaggatgtttcgtggagtgttaattagggaaatcagttcccaccagggctggggcagttgtgggaggggcccagggctggaggtgtagggttccttcctgcccagcccccatggaacggggtttcccacacctggcatggcaccagtcactctgcacatgtcctccctgtgtccttcgacacatccccatggggcgaggggagcttggaacagctcattttcctgatgacaggagaggtctgcgtccttggaaggcagaggcagatggagcaggcagtttgggttttttttttttttttttttgagacggagtctcactctgtcgcccaggctggagtgcagtggcatgatgtctgctcactgcaagctccgcctcctgggttcacgccattctcctgcctcagcctcctgagtagctgcgactacaggtgcctgccaccacgcccagctaattttttgtattttttagtagagacggggtttccccgtgttagccaggatggtctccatctcctgacctcgtgatctgcccgcctcggccttccaaagtgctgggattacaggtgtgagccaccacgcccggccccagtttgggttttaaatgacagttttctctgttgtgctagcacctcccctcagttcagggaccttcacccccagcctgggcatttcgtctggaatgagacttgtggggttgcttggcgcttgaggccaggatgtactctgagctgctgatggccatctcctctcctggggcctcgtttccctctgacctcctgccctcatcacctggtgatctggacccagggccatatcccttctctgcccagttcttggggcagtgatggtgtcaggccgtttgtgggtccccctggtgccctgtctgcccctccacaagacctgggaactgcgggaggatatggggacagcccaggggcaggctggggttcctgtgtgctcgggaatgcccctcagttccgcatggccttgtctgtacatggtgtgtgtgaccttgtgcccgacggtctggagggaccattgagtgggccattgcctgtccaggcctctcctgtgctccagaatgttacgagggacacctctccaaaggggtgggtgggggcgccgcgttcacagtcagcaccctggacagcccatcccccagctgctggtgcatcccatagcagggccaggtcccccgggaagtgggggcatctttgtagagctggcagacccctgcccaccctggggctgtgccccaagcccagtgctcccagtgaggacagattctcttaattagggatgtcccctggcacttctgccacggagctggcctctggtcctgcacactccagacacatccaccctggctcacacacaccctggctcacatgcaccccggatcccacccccgctgacactcaccccggttcccatgcaccccaggctcacatgcactcccggctcacacgcacccctgctcacacgcacttcggctcacacgcactccggcccacacgcaccccgctcacacaccctgctcacccagttcccacgcaccccaggctcccacggacctccgctcacatgcaccccggttcccacacaccccaggctcccatgcacctggctcacattcacgcccgctcacacgcaccccggctcacatgcacccccgcttgcatgcacctcgcctcccacccccgctcacacgcacccccggctcgcatcctgggctcccatgcacccccggctcccatgcacccctgggtcacacgcatccccgctcacacgcaccccagctctcacgcacccccgggctcacacccccaacagcttgcacccccggcacacatgcaccccggctcacacgcacccctgggtcacacgcatccccgctcacatgcaccccagctctcacgcacccccgggctcacaccaacagcttgcacccccggcacacatgcaccccggctcacacgcacccccgggctcacacgtgccctggctcacacgcacccctgggctcacatgcaccccggctcacacgcaccccaggtcacacgcatcccctcacatgcacccaggctcacacacccacccccagcccacactcatccccgctcacacacacccccactcacacacaccctggcccacacgcaccttggctcacgtgcaccccggctcacacgcaccccccctttcacacgcaccccgggctcacacgcaccccgggctcacacgcaccccccctttcacacgcaccccgggctcacatgcaccccggctcacacgcaccccctctcacacgcaccccggctcacacgcacccccctcacacgcaccccgggctcacacgcaccccgggctcacacgcaccccgggctcacacgcaccccctcttacacgcaccccgggcccacatgcactccggctcacacacaccctcactcatgcaccccgggcccacacgcaccccagctcccatgtacccctgctcacatgcaccccagctcccatgcatcccgggctcacacacaacttgactcacacgtctcaggttcatgcatccgtcccctggtgcgtctccgggccgccctccaccgggctgtgctggctgccacccccaagcctcttcctggtctcctgggaagcctcccctatcaccctaagctgcttctggggctggctttgctcagaagccacacccaggctgggcactgtgcccaggtctcctattggctccctgcagccacgaggggctgtgtggtcagagccagcaagtcagcccctgcctcggtactcccaatcctggggcccagagcacaggggtgacccctcttcctgcacccagtctgtccagctcccctgtgcgctgtgcctggcctgctggggaggggctctgggcgtgggtgtcagagctcagcaggcaccaggagccaatggctcagcagagcttcccaagataggtcctgcgctggcagcctccggacagcgttctgttttgaactttaagcggagatgctacctctggaaggccggggaaggacagagcctgccttctccccaggatggcctgagcgtgtgtgggacttgtggggccccagcagtggggggaatctgctctgaggggattttaccctgtggagcccagagggaccgaagacaccagtgacaggcctggcctgaatcttggggcaccagcagccatgctggcccttgggcagggagctgtgtcccatctccccagcacagcctcctgcctgccagccagccagtaaaagggtggcggcctccaacctccagcctggcgctggctgatgcactgctcagggaggggcaggtgagcgtgcacacgaggagggggcatctcccacccccaggccccctgaggcaagagtgttggggctcatgggccctccgtgggccctgccagggtggaggccccaggcctgtcttgagctgggctggtgttgcaggtgggggtggggcggctgctggtggccagcagctatcccagccttggtttctgtctggaaagtggggtgtgagtctggccactggggcttgggaggcttttatggggtgacttggggcttctggtagtcccccgggaacccccagagcctggggtctgagcctgtcctcaggcatgtggtctgggtgctccaaggggtttcatcaggttgaggggtggctttgccagcccattcccaagtcctgtccagtccagggtggggcagggatcccccagggctgcgcggcccttccccagaaccagtcaaccgtcggcaccccaggacgtctacccaccacccacctgggcacccacgctgcagaccgggagctggtcagcattttcgggggactgcttgtcccgtgcccaggcctggaacatatctcccgtctcatcctgaaacggcccaagcccgaggcctctgtctgaaggtggggtcctggcggacccctgcttcccttgaggccttgctgggccagcagcctagcaccctctctctgggcgcagcaccccctcgtctccccctgcctcttcctgttttaattgatttttataagaacaagcacttaggaaacacagtaagagctctggcggttacagacactgcaggaggtggccctccgggtggcaggtgctcctgtgggacccgcctgctttgttcccaccagtgcccatgtggctgtaagaaatcataacttggccgggcgcggtggctcatgcctgtaatctcagcactttgggaggccgagacgggctgatcatgaggtcaggagattgagatcaagaccatcctggcggctgggcgtggtggctcacgcctggaatcccagcactttgggaggtcgaggtgggtggatcacgaggttgggagatcaagaccatcctggctaacacggtgaaaccctgtctctactaaaagtacaaaaaattagctgggcgtggtggcgggcgcctgtagtcccagctactcgggaggctgaggcaggagaatggcgtgaacccgggaggcggaggttgcagtgagccgagatcgcgccactgcactccagcctgggtgacagtgcgagactcggtatcaaaaaaaaaacaaaaaagactattgtggctaaaccatctctactaaaaatacaaaaaattaaccgggtgtggtgggggcatgcctgtaatcccagctacttgggaggctgaggcaggagaatcacttgaacctgggaggcggaggaggttgcagtgagcccagatggtgccactgcactccagcctgagcaacagggtgagactccatctccaaaaaaagaaaaaaagaaagaaatcataaccaggagcagagtgtgagggaatcagcgtttctcctgccacgagtgacaggggacagctggggacatcacagagatcttgtcgggagctgggaatcggaatcctgggaccacctgccaggaagccccatcccggagtgagggcagggctgggtctccctgacagcacagtctggaaaggctggagtggcctgtcaggtggggagtgagccttctgccctgcgcagaccagacggtgaagcggggttaggggtgtgcagactgcgtcctggggcctaagatcccgtccctttggctccaggccaggggttgggcggatccctcctagagggagtggttcagaggcacaagggagcctccccgactgtggccatggagtgtgggtttggggatggggtgccagcccagggtgtcgggaaagactggcctgccctggacacccccccgggctgccgtgggatctagcaggactctgggtggttctggctcaggctggcaggcggcatggctttgggcttgtgggccgggctctgccctggggtccagagcttgcattggggcctcaccctgtctgtgtctctcctgttgctgtgccccagctgggaggctgtggcgtgctgggtgtcggcatctggctggccgccacacaggggagcttcgccacgctgtcctcttccttcccgtccctgtcggctgccaacttgctcatcatcaccggcgcctttgtcatggccatcggcttcgtgggctgcctgggtgccatcaaggagaacaagtgcctcctgctcactgtgagtgccggggcccaagcgatgctccgggtgggaccacgcagggtggggctccggtggcccccaggccttggctgccgcagtgaccccccagacgtgggcaccacctctggggccggacctccaggctggcagtgtggcccggggccctggccactgttgggtcttccaggccacactggggctggggggtgatttgcagagcggtgtgggggtcactcaagagaacgtgctgtaccttgtcaggggcctcccctgacgggacactggccctggtgagtgcaggcacagccccgcacacacgtacacacgcatgcgcagcctttcacgggcttgcggtctccgtgactcattcctgaccaccccacccccactgtggccccttccccagcttcttgttgggggcctggtctctcagctccctgggaccggctgctgggacgatcccagcccccacctcgcctcggggatggacttacaggcagggatatgtttatcctccttagaaatgttaatcacagataattaaaaaggaaaagggctcctagatggaaacacaggcttgctactgattaacatgcctggccgaggccgtgggccctgcggagggtgtgcagcctgctgaggtcctaaatcacgaggcttccgatcactcctttgtctgggaagccctggatgggttggggcctcccttaggtcgcctcagccagtccactcccctccgtaccccttcctgggggcaagccccaagtctatcagcctccctggcatcaggttggggcccagagacccctggaggcagtcggtgggggtctgtggcagccctactggggcttggagctcctcagttgaggaagctgctgtgtgtgggccccaccaggcctgcagggaccgaagcccaaccccctttcccatgggtgacttgggaccagaaccctgggtacctcctgggggtgaaggactcctgtgtccttagcccagcaccctgtctgccccactcacgcccactctgcctgggccccccagctcctggacacatgctgtccatgcctgccctcctcttttgtgggtgtcactgacccccgcatggaggagcagcagggctggggtcaggctgagctttggggctgccgccaggcgggggaagcttgcatggtcagaggtggggcttgcagcctgtggtcttgctggagggggcatcagccacgctggctgccctgaggactgtgacgtgtgggcagaaggggcctctgcagcccagctgtggcccctgctgggacatcttcccaccatgaagacaggcacccagcgaggcacctgccagacactcagaggcccctggatggaggtgtcctgaaggcagctgacaggggctggggcctcaggaacagggatttgtgcccacttgggggtgtctgggttgccccagggatgggggcaggggaggggagcccaggccagcccagggccccacactcaggggctgagcaggacacaacagccacagtccctggacctggggccaagggttctgaggtgggggcggcgttctgggctctctgggagtgggggcctggcagaggtttcctggcagcaccaggtatccatgaggtacgtggccctggcccctggcatgctgtggggcggaggctgtgcggcctttcgggtccctgtctgagcctgccccctccacagttcttcctgctgctgctgctggtgttcctgctggaggccaccatcgccatcctcttcttcgcctacacggacaaggtacggctgccttggccgcaggcccaactgcagggctgggggctccatcctcactcccagggagcactgtgggcccggtgtggacagagtggccctgcatgtgccctcacgggcagccaggacagcgggtgtggatttaccaggcctggaggggcagcgccagcgaccctgggaggctgtgctgtggctctatagcgactggggcacaagggcactgctaccccacccggagggtgcgccccaggttgtcccccgccctctgacgcagcgtcctgagccgtctgctcccagcgccccatccgggccgcgcaccgtggggttctcctctgtagagcggcctcttcttggtcactcactcatatattcagccatttgtttatactgggatgaagtcctggctattgaggttgcactccgagctagaacacactactttgttttgtgaatcacactgtccgtccttggccctggggagcttctgccgtctgctgctgggtcccctgacgtgcccccatcaacagacttttcattttggggcacgtcctgacttcctggcactgcagggcgctccaggctccttcattccctgccctggcccaggaatcagccccttctccagggtgctctgggtcctcactgaatattggggaccgaggccagggtgctgggtgggctcagcgctcatagcccctggctttcagctcacagagcatggctgcacgtgtcccgatacgtggaggcacctgtgtccctgtcctctgtccccccaggacccatggtcctcccccagcctggggaggaagcccagaggtgggggccctgggcctcagggctgctgggaggacatggggccggtgtgtctgcagcttggtgggctaggaggcgcgggggacacaagaccaggcgcaggaggggcccagcttaggggccggcgagggggtctggatgagggaggcggggtacagtgggaggggccctgctgaccccccccgcacccccagattgacaggtatgcccagcaagacctgaagaaaggcttgcacctgtacggcacgcagggcaacgtgggcctcaccaacgcctggagcatcatccagaccgacgtgaggcgtgggcaggtgggcggggtcggcgggtgccccctcccctcctgcctcagcccgacctgagcttgccccccagttccgctgctgtggcgtctccaactacactgactggttcgaggtgtacaacgccacgcgggtacctgactcctgctgcttggagttcagtgagagctgtgggctgcacgcccccggcacctggtggaaggcggtgagtgagacccccaccctgggggctggtaggggcctagagggcgggaccagcaggccctgccgtgacacgcatgacatccctccctgcagccgtgctacgagacggtgaaggtgtggcttcaggagaacctgctggctgtgggcatctttgggctgtgcacggcgctggtgcaggtatggcctgggggcctgcgggctccctgcccccactttgttaggaccttctgagcccagggaacaaagtagcaaagaccttgcccccaggaacccacgatcgggggaggccggggcaaaagcaggagggcgagttcagggggatgggcagggacggcctgtggggacagtgggctccctcttagtggacagaggcagaggctggtgtggggtggaggccggtggtcgtccatgttggtcggtggcccaggactggccagtgcacagagggtggcagctggggccctggtgccagtggcccctggtttccaaactccacagccctcaggaagttctgggtgtcctcatgcctgcaaggctcaggggagggtgctgtggctcgagccacaggggttgggtggggcgtgcaagccaccaggaagctgaagggctctgccactgtgtcgcccaccctggggtcggggtcagggccagggcacctgctgaggacagggactgctctgggcttgaggcctgagcctgtggagctgccatgcccagtcctcctcccctacctacagatcctgggcctgaccttcgccatgaccatgtactgccaagtggtcaaggcagacacctactgcgcgtaggccgcccaccgcccgcttctctgccaaaaggacgcccacggggagatggccgcacccacagctgcctttcccaccaccagcctcggtgctctgccccatgctgggaggagggagggagggacaggtgcctggagcccccggaaccctgtttctggaaggccctagctcaggtggcttcagggcctccggaccccccctgggaggggtggccacgtgctggctgcggaacccagggcaggggtgggaggggcctccagcactttttatatttacgtattctccaaagcagtgttcacacgggagccagcctgtggcccccagcctcctggaaaacaggttggcgctggaggagccgggtcttggcatcctggaggtggccccactggtcctggtgctccaggcggggccgtggacccctcacctacattccatagtgggcccgtggggctcctggtgcatcttaataaagtgtgagcagcaaccttgcgtctattgctcgtctgccttccctaccctatcttcccttctggcacccaggcctggggcagggcagcctctggcatgaacggtgcttaggcagagccctggggctgtggggtcacctggtgcacaggcttgggggagctgcctgcagagcagtctccagacctctggttttaaggaaatcatgacattagctctaagaagtgatgaggccgggtgcagtgactcacacctgtaatcccttcggctttgggaggccaaagtgggtggataacctgaggtcaggagtttgagaccagcctggccaacatggtgaaaccctgtctctactaaaaataaaaaattagccgggcgtggtggcgggcgcctgtaattccagctacttgggaggctgaggcaggagaatcgcttgattccaggagatggaggttgcaacgagccgagatcgcaccactgcactctagcctggatgacacaggaagagtccatctcaaaaaaaaaaaaaaaaaaagtaataaaaaataaagtgccaaggcccctggggggccgtccctgaactgccagcctttgctaggggtggcctccctctgcttcacccccccaccccgggggctcctcctgaggcgggcctccctccacatcgccccctaccctggggcctgctgtcgaggcggggctgtgcttttcccctattttgttcctagaactctgcccctttaagtgagctggcagcacaaagcacctgtcacagggcatgaaaaaaaatgcatcaaggtgcctcaggattctcacagccaggggtgagggttgtgtggggaccctggccacagggatgacggtcagttcaggttggggcatctgatccccaaactgcaccccacaatctcatttccagctaattcctgccccaccctctgcccatccccccgggagacacagcccgctctagacatcccatcctgtgtggcatccccacccctgcctccacccaatgctgatctggcaatgcctagctccaggcccacaccaccctcccagacctgcgtgtcccccaccctcactccaacagaagccacaggacccccgagaacaacttgaatgttagcgtcagcacctctggggagacaaggtcagtgccccaaagccagtggcagcttgtgtttttttagacaaggtttttggagtgcagtcggtcacagctcactgcagcctcaacctcatcaagcgatcctcccatctcagcctcctgagtagccaggagtacaggcacatgccaccatgtcttgctaatttttctatttttagggggtagagacggggtttcaccatgttgcccagcgttcctcccgccacggctttccaaagtactgggattacaggcatgaaccgccgcacacaccacttgtatctcctatgcccgtgtcaagcagcagcagggcggtgggaacggctgcacctgcactgtggcagctcgcaggcctccctgacgtccaggcggaggct

SEQ ID NO: 645 - DNA, 212209 bp, Homo sapiens
  source 1..212209: mol_type = genomic DNA
aacttccagtctaattagcagaaagcaaaagtgaccctagtgattatagccaggttttaaaaacttgtccccagtcaagcttagtgcaatggtagggcacgtgggaagcacagcatacagtttctttaaaatttaaaaaaatttcacttttaaagacagggtctccctctactgcccaggctggagtacagtggcatgatcctagtttactgcagcctccaacgcctgagcctcagcctccggagcagctgggactacaggggtgtgccaccacacccggttaattaaaacattttttttttgagatggggtttccctatgttgcccaggctgttcttgaattcctgagttcctgagctcaagcaatccttccacctgggccccccaaagtcctgggattacacgcgtgagccaccacacctggcctagaagacatttttgatgacagtaatgatgagaagagatggcgttttagtgctctttggaaacaagtttaggccttctagctttaagaatccgggcctataatcccagcactttgggaggcagaggcaggaggatggcttgagcccgggagtttgagaccagcttgggcccagggagaccaccgtctgtacaaaaaaaatcaaaaacttcgccggacgtggtggtgcgcgcctacagtcccaactactctggaggctgaggcgggatcacttgagcccgggaagtcgaggctgcagtgagccgtgatcgcaccactgcactcctgcctgggcaacagagtgagtccttgtctcaagaaaaaacaaaacaaaacaaaaagcaaaaaacacataaaatccaggcctgaaaaagcgcccgggccagacatgcctagctggagtttctcctgccttagcgcacccctcaggcacacggtgccctgtagtcgcccttggaggccgccagctcctggggaggcatggccctttctgcgggaggtgtctcaggcaggctccaacacacacccgcgctgtcagcatctcgcacagtccgcccgaaacaccagggaaggggttcgtaggtgtgggggtggggtggcgaggccaggcagcctggcgcgagggagagagccgaggcctgggccaggaaggcccttgggtgccgtgtgggcgcagagcccaggagagcgcactgccaggcccggacctccccgcccctaccccgggaagaggcccgttcgccgcagggggaaggcgggatcatagcacctcggaggagcggccggtccgggcatgcgggcggcggggcggggagggaggcttccggaaccccgagagagcacccgtgcctcgcgggccccgtgccccgtccccgggctccccttcctctaacgcaggggacccagcccggggcagtgccgggcactggcgctggcgccccgctcagccctgcgatccttctccgccccgcccctccccgctccgccccgcccctccccgctccgcccccgggccgccccgccccgcaggctcgccattcccgggcaggccccgccccctgtttccgctggcggcggcggcggcggcggtgccggagcgcgagcagagcggagacccccaggtcctgcgggcgcggtgagtgcggcccgggcggcgggcggcgaggcgggtctcgagagcgtgcggagtcgcgcggccttgagccggcgccgggcgggctgggcacccccaggccgagacccgagaagggggagcggccgggggcgcccacgggaggcagtgtgggcagggcggcggtgggacgagaggacgaggaacagagtaggcgccgtgcgggaagcgggccgggaaggggagggtgggtgcggggcccgggcaccgagcgaagtggggtcctccaggggatggctccgaggaagaccgtttcagaaagggagtaacccggggccggcaagggtttccgactgtgtgaccccgtgcaccgcttgggacagtccatacaaggaccccagagagggccagggggccttcgggcagggctgggatatggcctgcagccccccggcacccgcgaccgctccctgggccactgctggaagatcagcactccgagtgacaggactctggcacatcccgaagttggagatctagcccatctgtgcattcaagtttgggacttcaaaaaactttcttgtggtttttaaaaaaagatccaaacaagaaaccggcttgttgttgtaagagcaatatttgtacttgtacatcttggaactggagtcttggatctcctccctctttgaaaaatatacgagtcactgcttcatcttcccccaaatgcctgttttgtctggggaagcttgggctagtatgggatcccctgagctacctttttctcgcatcaccaaaacggggggtaagaaggcaggggcttacctgccttacctggtaactcttagttcagagacccagtctctcattatgtgcgcgtgcccttctgacctgcagctgtccttttccctggggtgactcaggtatttcctcctccaggaagctttcctggactagtggagaaaactgaagactcatgcgaggatccctatatatacctgccagctcccttctctttactgaaaatagccacagagaatgttgaatatatgctttgctatagagatacgcagccagcttgccatcataagtaatggggaggggaggagagggattatggataatttcaaacaatagcctggacaaatcatttatatttagctaaggaatgcagccagagaggcagacaattacaccggcttcctaccctcggcttggtcctggcatggctgatgcagctgggctgtgggttggagggagaggattggggtagataaaacttgaagtgtaattcagttctactctcactcactgaagacgccctgtgtgcaagtccctgaacaggtgagagtaggatttttttttttttggtctggtttaatcagattttaatattctggcagagctttttaaacctatgaacagatatttaatattaataacaataactagtgttgataaagtaatttatagttggccaagttttttctatgcacgttacattagctgtatataattttatttaattcatacgtaatcttgtgaaatttgttacttttttttttttttttgagacagagtctcactctgttgcccaggctggagtgcagtggcaggatctcagctcactgcaacccccgcgtcccaggttcaagccattctcctgcctcagcctcccgagtagctgggattacaggcgcgtgccgccacgccttctaatttttgtatttttagtagagatgaggttttgccatgttgaccaggctggtcttgaactcctgacctcaagtgatccacctgccttggcctcccacagtgctgggattataggcgtgagccaccgcattggctgaagtttgttacttttaattgccttcttataggttaagaaaatgatactcagagagaataagtatcttatctaaggtcacaacactcattaagtgaaagaagcaaaacttgaaccctggcttctgaccttcctgccttgtgccatctattctgccatctgcctctctgcccttcttctattttatttatttatttttttctgagacagacttttgcttttgttgcccaggctggagtgcgatggcactatctcggctcactgcaacctctgcctactgggttcaagtgattctcctgcctcaacctcccaagtaactgggattacaggtgcccgccaccacacctggctaatttttgtatttttagtagagatggagtttcgccatgttggccagactggtctcaaactcctgacctcaggtgatccgcctgccttggcctcccaaagtgctgggattacaggcatgaaccaccgtacttagccccttcttctattttttttttttttttttagagacagggtcttgctttgttgcctgggctggagcacagggacacaagcagctcactgcagcctccaactcctgggctcaagtgatcctcccaccttagcctcccgagtagctgggactataggtacaggccccatgctcagataattaaaaaaattttttttttttttttggtagagacagggttgtgctatgttgcccaggctggtctctggtcttgaactcctggcctcaagcaattctcctaccttggcctcccaaagtgttgggattacaggcgtgagccaccacgcccagcccctttcctctatgttgagccttgtcttcacctggcaccacctatttgtgcaaccttgggcaatttacctcctctttccaactctctgttttggtggtatattggattagaaatattctagagtctcttccagcatcagataattaacagtgtaagatattggcagccactcaatcaattaggaagtgtgctttatataaaaaattctaaaattgtggttaaaaaaacactgaatgtaaaatcttttttttgttgttgttgtttttgagatggagtctcactctgtcgcccaggctggagtgcagtggcataatcacagctcactgcaacctccgcctcccgggttcaagcaattctctgcctcagcctccccagtagctgggactacaggcgcccgccatcaccctcggctaaattttgtattttttttagtagagacggggtttcaccatgttggccaggctggtcttgaactcctgacctcatgatccaccctcctcggccccaaaaagtgctgggattacaagcatgagccaccgcgcctggcaaatgtaaaatcttaagtgtacattttaaccattcttaaatgtacagttcagtagcattaagtctatttacattgttgtgcgacagctccagaaattaccttgtaaaactgaagctttaatattcttgaaacaactgtttccccctcctcccagcctctggcagccactattctgtctgtttagtgtgctttattaagctcctgctgtgtgcttagtaaatgctgaccttgaggaattaatcgggagagttgtggagaagcagcccagcttaggtgggaagcccttgaacctggggtggctggagggagtgcccccttttcgcaggcctgtaaccccagggccagccagcactgttaagtgaatgagtgagtgggttgggacttgggcggatgccttcacctcctttagtctcagctccttgcttgcaaaatgaggataacaataccaagtactcagggtgttgggaaggagccatgagctgatgtatgtgaggcacgtagctcagggcctcatatacagcaggtgtgcagtaaacggtggctgttatttataacctcgtggaggagactggactaagatgcttggaacaagagaggacaagacttcttttctctgccgtgagggcccagcctgcagtggttgtcatcctcactgactaagagggagtggatctaatcccggtgcattcgcctggcattcagcatcctgcctgtctagccttatcgccactctcctccctcctggaacccttggttctagccagacttatctcccaagcatgctttgcgcgttccttcttggccccttagttcatcctcttccaccttcctggttggttcttccatccctctcctctttcaagacctttctcatgtctgagctcctctcaagaccctggcatcccatcccaaatgaacctctttttcctgggaaccccggtggcattttctgtcttcattttgctcctggcctttatatacttccttgggtggttctctagtgaactccacaaacagtgtatgtgtcacatgtataagagtctgtgctgggctggatgcggtgcctcacatctgtaatcccagtattttgggaagctgatgtgggaggatcacttgagcccagggatttgagaccaccctgggcaacatagtgaggcctctgtatctaaaaaattgtgtgtgtgtgtgtgtgtgtgtgtgtctgtgtgtgtatatatatgccaggtgtggtggtacacacctgtggacctatggtcccagctggaggtggaaggatcgcttgagttcaggagttcgaggcttcagtgagccatgattgtgtcactgcactccaggctgagtaacagagcgagaattctgtctcttaaaaaaaaaagtctgtgctaagttctgatgctgcaaaaataaaaaagataaacgtccttatcttcatggggcttataagccagtaaagagttgagaaatgggctcgaaagatgacagttcaaaggacaaggcgaatggcttctgagagcagaatgttatgtgggttgaaacagttcagtcaccttgattgaggagcaccattgcatgcagcaagtggtggtggacatgaaccccggaggggagcttgcatttcaacagaaggaggaaggatcagcctggggctaggcactgagaaagttgaatggtgcttgtgaatggtgcaggtgggccaggtgtggcatgtgtgcagggaagccatggaggagaggttgggcaggtagacaacagctgtattgtgtgtggccttcaaatcaccagccaagaactttatctgtccattcattcttccaagagaacttgagtgcccaccgtgtgccagcattaaactggtgctgtggagatagccatcaaccttgggaggccctgggaagtttgcaggttttgagcaagggtaagagaagcagggctgggcttaaggagggtgaatctgaggtctgtgaagaggggacgtcatggtagggagagtggctgggcacttgtgagggatggtgaggaggcaatgaacctgagacattttggaagtaggatcaggatcatttgtaacttgattggatggggaggtgaggaaaggatgaagttgaagggggattgaagctgattctgtgctgggtgattgtgaaaatgcaatgccatttgctgtttccggtaggcattgtttcgtcaactagattgcaagccccttcagggcatggattctaattccctctgatgttctccttgaccctgaaatcactgctgtgaggcacagaacagagtaggcacagtggacccctcacgatctcaagaaatgaagcttgcactttctggcatcccaaatttgtatccacagcaatatttgttcatgggcctggctttctccggagtcatgtttctgcagagtcaaatgtttcctgtatatatcctcacaccccaagttaactgccctttcagtttctgctgcagttttatttctcacttgatggccattttccaccaagtttttattgctccataagagtaactttgaatgtggtagagatgaaaacaacaaggtggccctttcctttatattgacctcatagcgtacgcgatgcaaacacatctcagtgagtttacacacttttacatatcttgaaactttgggtcacttgtgagtggccaaaattgtaatattaaatccttggatgacaaaggtctaccccagggatgacaaatacatggtgaggattctgttacttctgtaactgcccgtggcagacatcactaatcaatcgcagctgtcttttctgctgggccagggcttgggttctgctcataatgccttgggtacccaccgccaactgagtggcattagcacactgccttcctgtttgccatttctggctttctccatttgttgagtgagcagtttcttggtaggggactgctgccccaaagagtggtccttgatggacagaattcaccctggagtggcttcttaccaaagtgatgacctaattttttgccttcctgcaggaatatcctggaaccttcttttgtttgtcagcagccaaggtgtttccaggaagttcagagagaacaggtcagtgttggtccgggtccattgtggggtagggcctctgaacgtctgtgtgttataacctctgtctgaagtcaaggtctttcttgccctttaactgtgggttgggcaggatagaagaggatgctgacattttctagttgtcgtgccctgactcctggctttgattttctaagctccttaaattgggctttgggggccaggcaagaatgatctcctccccactgtttctgattggtggctgatggtactcttagattctttcttggccaccccatttgtgtggaggaagcctagggagaggcctgtaacttcctgcttcctgtctcctcccagcaggcttgggagccagggtggaggggcctcccacaacaggccagaagagaagatgcaggagtcctggccagtccttagtgtctccattttgctctgcccaccgccctccaccaggacccctacggggccctcttccctgatcctccaggctcctgggggtcttgctgatggtttgttcattgttcctagcacttgtgcatcgaggcctccgctgtgccagactacagaccaggcagccagacagtgggggtggacggtgctgattcaggttcccttggggtgctgtttactgacctgggcctttttatgtttaatttatgtgtgttttctcctgcggcttctccctgctgggtgatttgtaaaatcttaccttccctgaacccaatggtgtagtcggtggagcagggagagggggtggaatggtgctggctggtggctcatcttgccaaagattctcttgtctgtgagttccagcagggattatttggtgtcccaagagtggccaggaacctcttattgtcctgccatgccttgcacgttatacttaggatgccagtattcatatttgtcatcatgatcagactcagttttagaccctttacaaatgtccacaaccaatttaacttaatcagatgaagttataatttaaatctcatttaactttcacaaaggccccgtggggtagctgtcatgtcctcctcctttaccagcggcagcaggtaaggcccacatagtgttagccggagcaggggctccagcccagatgctatgaccctgcagcgcctgccttttctaatgcagacctgcggctgttcttaactgactctgggaatccgctccaggtccctccctgagcctgcttgtggcaggaatgcctgagctcccattttaagtcctcctcccgcctccctggggcccggatgggtgtctgctttcattcttgcagctctgggatttgaggcaccgcgtatcactggatggtgcagtgccgctaggcacatgggcttgggtggaggaaaatcagtctggtgaagatcaggcagtaaccgtccaggtgcagtggctcacgcctggaatccctgtgctttgggaggctgaggcaggagttcaagactagactgggcaatatagtgaaactttgtccctattaaaaaaaaaaaaagaccgggcggcagagagggaaggacttaaggacaagggaatgaccgtcctgctgtgcggcatgtcccccacatcccgtggggcctgttcctggtgggccctgccagacagaacttggtgaagggctccccaggaggcctgtatggccttggggagacacagatagcccctgacgtcaccagccgtgtctatctagatgaccgtctttcctctgtgcatctgcgttgaaacccaagtgagggagatgtgagtggaggcctcagcagacaggacgttgatcctctctgatggctgtggctccagggggctttggttttgcatttctcgtcatgctctggagccatgctctgggatgttgaccagctctggggtgggaggttcttgtcctggctcctgctcctacctgtaactgctgtgcgaacttgggcaagtcgattggcttcttcaggccattttcctcacctacaaagcggcaggttgggtgacccactgccaaggttctttctggctctgctggaggtggtttctgaggtgggatgagttggtatgcctgggttttggcttccagtcctgggcctgccttctgcctctgactagtgccttcccggcctctgacctggaggtggatggaggaggaaagagtgaagttaatgagtaaactggagatgctgacttctgataggagcggactgggggtggaagttgtttgcggagatggtcccctgccccgtgagtggcgagtggcggggtcctactgcctgacttctgtcctgtgtagacggctctgctgttgatttggtttaaactctcttcttcgtgcccgtgcctgaggcagtgaggagtaagcctccattgctggactccagccctgcatgttaatcatttcaacttcaatcatagccacagcataacgaaatgagaatatctgcctggagcaggttagcttccaaactctctccttgctctcaaaccaaaagtgtaaccagaattttagcctgaaccaggagggtgctcttcagaatgggaaggagatagaagaacccctttgctggcatctggagttgggagcacgatcctatctgcatttcaacccgatactttggagccaaatgtagatttttttttttttttggcctattgtttagtattatctgtgctttgatttaccacaccccttccgccctctgttttctctcaggctccctcacagtggatggctggaaattgatgatactttgaatattcactcactttctgagagtcttgtgaccatttctactctcaatggtcatcatttttagaacatctgatcttgtgttaggaacaggaaaagatctggtagagagcagtccagggggtccgaagagtcaggaagctcagtaagtgccccctgaaatcctcccacctgctggagaggctttgctgttattgcaggaaggctggagggtcttgtggcctttggggtacaggatcttggtgaggccttggccttggccttagtagcttaggattgctgctaactctcacagcacgtttgtgcgaaatttgaaaaatggcccttcttcaggttacaagcaaaaattaaagtgaatatattattgtacagctggaacaaggtccaactgtgtctgaggcaacccccttgagccctcgtgggcagtgaccctggctgtgcgcacacttggaggcacgccgcctccaatcatggggtgcacatgttgctggaaacacacacagtctggtccctccccttgcaatgtggggaatgtgtcaggttcagagtcagggagagggcctctgaggacagtgaacaggtgagggaagtgagctggggtgggagggattctcagagcaagattgaaacagggtgcagccatgcacatgtgtgggtgttagtgactatgtgcacacttgccttacatgtgtgttgggtgtgcttgcatgggtttgtgtgggagggcactctgcattgttttggcactcagtggaggggcccacgtgtgcactctcaatagatcagtataggccagacacagtggctgtcatctgtaggcccagcactttcggaggccaaggcgggagcattgcttgagaccagcctggacaacatagtgagacctcgtctctaataagaatagaaaaaaaaattagtcaggtgtggtaatcagtgtgtgcctgtagtcccagctactcaggaggctgaggcaggaggattgcttaagcccagaaagttgaggctgtagtgagccatgatcgtaccactgcactccgggctgggtgacagagtgagaccctgtctcaagaagaaaagggtccgggcatggtgactcacacctgtaatgccagcgctttggaaagccaaggcaggcaaatcatgaggtcgagagttcgagatcagcttggccaacatggtgaaaccccatctctactaaaaatacaaaaattagccgggcttggtggtgcgcacctgtaataccagatactcgggaggctgaggcaggagaattgcttgaatctgggaggcggaggttgcagtgagccaatattggccactgcactccagcctgggcaacagagccaagactccatcttggaaaaaaaaaaatgtcagtatatacctgtgatgtgagtgccttccccttagatggcagggtaaaacctggacacggtacctgggaaccctgctgacggcctctcccctggccacctgccagtgtggagactgaggcttaggggcccaaagctctccgacaagccctgagggtggcagtgccagggacagtaggagaagatcctgcctcagcaagtccccagccccgtctcagggccaggctctacaggagggctcagaggggcagggtgcccagctgagtttgaatgaactgtgtctttccgggtgtgtgaacatgcaggatgacatgttttgttttagagaaaatgaggtagaggtctgggcttgcaattttccacttgtcttaatcctgggagattctaaacagctttgtttaaaaactggacatgcagattgcaaagacctgagtgaggaagagccattgggtcccccaggaaaacaattaggtttgaagccagagtttggatttgttcgaccattttgagtgctgtctgcagcatgtgggacctggaggcgcttacagcatcacccatggtgtgagtcactccaaattagcagccatttcaaattggcttccactgacttgctgctggggatgggtggggctgggggggaagctccaggcctggctgtcacccatcatccaggctgtggccggcagagaggggagggggctggaacaacctgtcttggctcagcctgcccccactgttggccagagaagctggagctggtggtctgtgaaggtctcctggacggagcagttcgtgcccgcagtgcagggagaacactggagaccatgcaattcagggcagggttggtggaactttttcttggcatccatttgagaaactcagaggggatcaggctgggccttgagggagggctgggatttagggagggaagagaagggtctctgaggggttgtaatgctggctgggagcttggttggggtggggacaggtgtggcctgcaggagagggtgagctgttctgtctggggcacctgacatactgcttggagcagctcaggcgcgggaggctggtggtgggagccagtgttggtctttgaacagtggaatgacaggatgaaaagggacactataggctgggtgtgatggctcacgcctgtaatcccagcactttgggaggccgatgcaggcggatcacgaggtcaggagatcgagatcatcctggctaacacggtgaaaccccatctgtactaaaaatgcaaaaaattagccgggcgtggtggcgggcgcctgtagtcccagccactcgggaggctgaggcaggagaatggcatgaacctgggaggtggagcttgcagtgagctgagatcgcgccactgcactccagcctgggtgacagagcgagactccatctcaaaaaagaaaaaaaaaaagaaaagggacattataggaaaaattagattgtagcagaattcaaggtgaattttttttttttttttgagacaagtcttgttctgtcccccaggctggagtgcagtggcgtgatcttggctcactgcaacctcccactccctagttcaagcgattctcctgcctcagcctcccgagtagctgggattacaggcatgtgccaccacgcctggctaatttttgtatttttagtagagacggggttttaccgtgttggccagggtggtctcgatctcctgacctcgtgatccgccctccttggcctcccaaagtgctgggattacaggtgtgagccactgcgcctggtctcaaggtgaatttttttttaaaaagcatccttttggctgggtgtggtagcttatgcctgtactcccagcactctggggggccgaggtgggaggatcagttgagctcaggagtttgagaccagcctgggcaacatagcaagatcctgactctacaaaaaattaaaaaacgtagccaggcatgcatacctgtagtcccagccactcgggaggctgaggtgggagggttgcctgatcccaggagtttgaggctacagtgagctgtgatcacgccgctgtactccagcctgggcaacagagtgagatcctgtctcaaaataaataaataaataaataaaataaaagcatccttttttttgttgcaaaataataaaaactcattataatatccaaacattacataaattatagaagaggaaaatctcccctaatcctacccatcagagataatcactgttaatactttggtttgtattatttccagatatttctggatagactagcatccagccgtccacctatttatcttctcaatttccataaatagaattgaattcaacttactgttttgcccgttctttaggcatcttttcacatcagtacattcagaacaaccttattcttttccgtagttggcgcagacttgctgaatggattttgttccattcatcactgaggtctatgctgcatagaccaccccaaaatatagtggattaacacaaacaccattttctttgcttccagttctacgggttagccttttgggctggtctctgcagtcttgcctgggcttattaatgcggtagcagtcagctggtagctctgcaggccctggacagctcaaggaagcttcatcatatatccggtggttggtgctggctgtcagctgggctcccctgctacgtggtttctcactgtcaaggaaactagcctttcaggtgaaaacagtctacaagacctcttaatatctaggccctgaagcctcacacacgcattgtctgttgattgctggtaacagcaagtcatgggaccagcagaactccaggggcgggcagactccacctcttggtgggaaggctggccacggcacaaggagggtatgtgtgttccaggtggggaggacgcggacgtgcgatccctccctgtgcccagaagcatgaggaatagaccccacaggtaatgaggaataatgaggaatagaccgcagagataatgaggaatagaccccaccgatctttggaagatagtgcagaccccttctcctcccagatcactgttcatccccagatgggtcatccagggaaactggcaaacactcgatcttcatgttgggtgtcctttgaagtggagtcagtgtgttgtgtgtgtgcacgcggctagcgctggcagaggcttggactttgtagtagacagtgtctcctgccctatggctctgagagctgtagaagtcaaaccttcctgccctctgcaagctgccaagagcttgtcttcttggtactccctgctgattttcatggcatctctgaaaaatgtgtcagtgagcgacaggtctttaacaaagctagtccggccttccaggcccaggcgtctgctgggattttattcattcatttgccaaccactacgctccaggcttcctccgcatccgctcataacctcggatatgaaataagagggcccaggcctatgtgattcacagacttcacttttccttctcaagcaactcacaatggactcgacaccgtgacttcccgcaaggtgttcgtttttatatttagttttctcatcacctgccttagtggctgttcccttcctgtgaaatgtcaccaatggcagggaggcaggaggaggcaggggaagagccagtgatgggtcattaatgcatccccaaaccccagcttagaggatgctacagtggagctgctggtggaagagttctccccagcaccaatcattcatcaaacttacctctccctggagatccgaggctggacctgatgaaatgcactttctcgtgcagcagtgttcttttgcctgtcaactgctgggtggtttttgcattcatcaaataagaacaaaggcagagtgggcttaacgcgtttgaaatccccttggtgttttattgtctccctgctccccctcagcagcttttagtaaagaaatgttttgtagctgaaaaaggttcactgtgaaagcattctgcacctccacaactccgcctctggcctggcctcttcaactgtgctgtgggagaggagttgctgaagactgtgttggaggagggagtatggcctagcactgcagcacccttgggagctcccagtgcctctgggtgacttgggggtgccagcattgtgctcctgttgcagggttaatgagctgatcagctcacaggttttatattaatcagtgctcagtgttgacaaaaacatgcaatgctgactgtgcaaacctttgagaaatctggcatcacggacaagaaaagaaacctcagcaactgcttttggccatagaattggaaaaaactggatagagctcctcagcctgctccaactgagggctcgctagcttgaggcctgtagcaggtaaattccccagaagcggagacctgccaggccctccctgactccttagttctctgctcaggtccccactccacccctccgttacttgttctccatggctgtgaggatggattcaagtcatactgtcagtgaatcagtaagtcgttactgtgtgctttgattcctcaagggtctgaggcatcttttggcccaggtgctccgtgtgataagagagctttagccaagtgtaaagttaggtcagtccccagctctttctgctcatggctacaaatgtctatttctgttttacccagttccctcatagttcccgagggcccagtcctgcagcacctataacacccaggagtgggctctgaaggcagcaagacaagtaggaagggataagattgctacagatacagccagagccccctgagaggagatgcctgccttgactcagcagggagctctcactgctgtatggacacacctaatttgacataaaaaatgacgctacccactttcatcatccaccttacccactgcttatccaaatgggtctcagttgtttggcacattggatgtccccgtaaggacaaggatggtccttccctgaggatgctcagtggactccctgggcgctgaggattgttcttcaggagcacagtagcaacatctttggaaccagtgtgtggctttcccagagaggccgcagtcaactggctgagagggaggttagaaatgagtaggcaggcctccctgccaccacgcccagggctgggggagctggcgagtgcttccagcctgctcttggcctggacactgcaggctgggcctcttcctgcgaggagctcacgttctgatgttcagattgaacctggaacacggaaagcattcagagtcctggcgttgtcctgaatcatacacattgtcttctctgggaaagcttttggggccgctggcctttgggatgctgacacgaattgtgggacacacttaggccaagaagggaagccacagaattgcccccagttctgggagatgggatggcagtctggtttcctgggcccaccttccagctggctttggttgtgctgtgcccatcagccgaagtagatggacttgaccctgtctttgggggccaggcgtggggggcagtagggatcttgagtgtgagccccccatcctgattctggggcaagggagaaggtgaatttgaccacaggaagaaaagtggagaggtagggtctggtctccagctcacccataaaagctggtgagtctccgagtgtcctcaggtctgtggggagggcatcagctgcagttcctgattctgctacagaacgtggatgggggctgcggactacctcatgccacctccaaccagccacaagtttctgttgcagggaacagagggcagatcgaatggatcccccattagaagagtgcctgacacagagtaggccttaacagatatttgttgatgggagataggaaggggatagtgagttacagctatggaaagaaactcaactaggccaatcacagtttgagggattgagggaaagaccccatcctaccttaaaatgcctcttcactagcttggccagctggtggaacccctgccgttagatgtttgttcttttggaggctctttggttttcaggagtcttctcttgatttgctttgttttattgttaatttgtacttatttatttatttttaaagacagggtctcgctctgtcatgcacgctgaagtgcagtagcgcaataatagctcactgcagcctccaactcctgggctcaagcaatcctcctgcctcagcctcctgagtagttgggaccacagatgtgcaacaccatgattgactaattattatttatttgtagagatggggtcgcactatgttgcccaggctggtcttgaactcctggccttaaggggttcttttgcttctgcctcccaaagtgttgggattataggcatgagtgagccaccacgcccagcccaggagtcttctcttaaaatgccacagcctcttggagaggcttcctgtttctagccgtggcaggagatcagcatggccttttggagatgaaatctaagaggtagggtcaagccacccctagattcctgctttctttgcgcaccttcccaacattgcctctattagagaaattcccaaaccttttctttctgtggaaactgcagcagagcagaagactccagggacctccccatgcctctccaagaaaattattgccaagcagtcctcataggcattcataggatgatggcgtggctttaaagaaacacctaagggaatatctgtttttttgggtggttgttttaaatcaattatcttgttgttgttgttgttgtttttttttttttttgagacggagttttgctcttgttgtccaggctgcagtgcagtggtgcagtctcggctcaccacaacctccgctcctgggttcaagcgattctcctgcctcagcctcccgagtagctgggattacaggtggctgccactactcctggctaattttgtatttttagcagagatgaggtttctccatgttggtcaggctggtctcgaactcctgacctcaggtgatcctccagcctcagcctcccaaagtactgcgattacaggcgtgagccaacacgcccggcaaaaatcaataatcttttttttttttttttttttttgtttttaaatttatttttttattgataattcttgggtgtttctcacagagggggatttggcagggtcatgggacaatagtggagggaaggtcagcagataaacaagtgaacaaaggtctctggttttcctaggcagaggaccctgcggccttccgcagtgtttgtgtccctgattacttgagattagggattggtgatgactcttaacgagcatgctgccttcaagcatctgtttaacaaagcacatcttgcaccgcccttaatccattcaaccctgagtggacacagtacatgtttcagagagcacagggttgggggtaaggtcacagatcaacaggatcccaaggcagaggaatttttcttagtgcagaacaaaatgaaaagtctcccatgtctacttctttctacacagacacggcaaccatccgatttctcaatcttttccccacctttcccgcctttctattccacaaaaccgccattgtcatcctggcccgttctcaatgagctgttgggtacacctcccagacggggtggtggccgggcagaggggctcctcacttcccagtaggggcggccgggcagaggcgcccctcacctcccggacggggcggctggccgggcgggggactgacccccccccacctccctcccggacggggcggctggccgggcagaggggctcctcacttcccagtaggggcggccgggcagaggcgcccctcacctcccagacggggcggctggccgggcggagggctgaccccccccacctccctcccggacggggcggctggccaggcagaggggctcctcacttcccagatggggcggcggggcagaggcgctccccacatctcagacgatgggcggccgggcagagacgctcctcacttcctagatgtgatggcggctgggaagaggcgctcctcacttcctagatgggatggcggccgggcggagacgctcctcactttccagactgggcagccaggcagaggggctcctcacatcccagacgatgggcggccaggcagagacactcctcacttcccagacggggtggcggccgggcagaggctgcaatctcggcactttgggaggccaaggcaggcggctgctccttgccctcgggccccgcggggcctgtccgctcctccagccgctgcctcccgggcggcgctcccggcgcggcggcaaagactgagacagctccgctgcccgctgaactccatcctcccggcggtcgggcggcggcggctgccgcttgtgtagttttaaatgttcaaaatcaataatctttaatacagtcttgattcaagtcaggaactaaaacatagatactgccacatcctaaacccagtgctgtagggactggtctgtgcaccctggtgtttctgagaccttgcagccacctctacctcccgattccccacgactccagggtctgcactgcctgctagagaactgacttactggcatgggacttctgcggcctcactggcattcttagaggcagggacatttctaacatctctcctaagtatctcttgtgcattgtctctttattccttctgaagagcagaggccttggttttccattcactggtgctttccctgttttctcattgcctggcacctggtggacacagaaatattttttgaatgaatgaatgaatgaatattgcacttgtgatctaagagatgtggccctaatctcatccatttccccaggacacttagacacttgcttgctttaaaaccacccatcttcatattgcaggggtttcaaacatttcaggagaggcagtgaggatctttctttctttctttttttttttattttgagacggaatctcgctctgtcgcccggagtgcaatggcatgatctcggctcactgcaagctccgcctcccgggttcacgccattctcctgcctcagcctcccgagtagctgggactacaggtgcccgccaccacgcccggctaattttgtttttttgtatttttagtagagacggggtttcaccatgttagccaggatggtctcgatcttctcacctcgtgatctgcctgccttggcctcccaaagtgctgggattacagaggatctttcttaagtcaggagctccttgttaaagtgtctatggctctgggaggggagttatgctgcctttcccaaaagaggtggcgaggacgttgagggaagaggaggccattgctcagaatttcatgctgaggatactgaggctggctttccttgggtgtctgggcagttgagcagaggaggctggagccaggctttctggattgtgacccagattctgtcgtttctctccccctcccatgcctgcttccgtcttcgtcagctcgacccagggtcacctcagagctcccagcagagtctgtgggcagctttggaggaaaacatgcgcccaaaatggccaaatccatgaggacttgagagaggcacgtgtgtggctattttgggtttggtgggctgagctcagatctctctggcattcccagccactggcttctgagaattgagcagaatggaaggatgttaaaaagcgaggctccaggagcagcccaagaatttgctcattctttacctctgggaggaggtgctcaccccggaacccacaaggaggaatggggctgagggaagggactatggcagggagggggcaggggaagagagggaaagttcaagacgatttcctcttcctcttctgtgacttcctggaggaggggtggcaagtacagtgctggcccagggccaatctgataaggtagcaggacttagagcccagaggaatggctccccccgcaatccatgcctctgggggagttgcctggtaacagccattggctggggtggtgcatcagcctctctgcctctctgaatgtctctttcaatttctctatccttctcccacatcaggctagggacagctctgatctcaaatgactggggagtcttcatctctttctcccttccccagagtcaggcagagaagcccctttcactcagtgcacatgagggagacatgtgagcacctcctccgtggaagttcaggagctcagtgatgccggggtctgtctttgcccctgaggagctagtgtggacgtgtggagacacgcatgtgtagatgtgcaccgatgcaggacgtcggccagagtgcagagtgcagagtgcagccggatgtgacaggcagagcgggtcagtgggaagagctgcccagtaggagtcagggcccccagctggcctggggcaagtcatgtcatttcttggtgcctcagatttttccatctgtcaagtgaggggtttatgatgcctgaagtcctttctggcttaagagttacctgattccaggagttgcagggagaagagccttaaagatgggtagaatgttttcattgcctctgtctttgttccaaattgggtctacccttggacccatctcagctgggttgttcccatgaagagggggcaggctgagggctcaggtgttacactcggatcccagacctcgcttctgttctctggaccctcctgttaggaaaactgccaaatttgcctttaggttcagaaaatcagttgcacctgtctagaacaaggtggttcatccttggcctgcaagggagggctgagtgactgcctgagacccacagagcctgctggggactgacatctgctcccatccagcctcgttctttgcttagagtcactttgtccgtattgtttctgtaatgccaaattacttgtagctctttcttcctttcccagtcatgaggtttcatttttcattgttctcagtgtgatctaccttgcttgaaatgcttcccggatatggcattgtttttttttttctctctctctcttttttttttttgggatggagtctcactctgttgcccagcctggagtgcagtggagtgatcccgcctctctgcaaccgcagcctcctgggttcaagtgattcttgctcctcaacctcctgagtagccatgtgactatgggtgtgcatcaccacgcccggctaatttttgtgtttttagtaaagatggggtttcaccatgttggccaggctggtctcgaactcctgacctcaggtgatccacctgccttggctctccaaagtgctgggtttacaggtgtgagccatggtgcctggcctattttatctcttaactgcattgttttagcaaatttgaaaatttgctcagctgttgtttaagtatttttccatctccacttccctctcctttctttctggtaccccaattatatggatatttgactgtttgatattgtcctgtaggttgctgatgttattttttcagtattttttccttctgtgcttcattttgaatagtttctattgctatgtcttcaagcgcacggatcttctgcagtgggtaatctcatgttcaataattccctctggtgtatttttcatttctgacattgtatttcccatttctagacattccatttgagtgtttgttgtatctttgtctcatcatgttgatgttttcctctgcattcttgagctttggagcgtacttacaatacttgtttatttcatctttatctactagtttcatcatctctgttatttttgggtttgttctgttgactgatttttctgtttatgatttttctcctccatatttttctgcttctttgaatgtctactgatttttaattggatgccagatcctgtaaatttaatgttgatgggtattgggttttgttatatttccttgagtggtattgggctttattctggcattcatttaaattgcttgggctcagtttcatacatttgaggtttgctgttaagctttgttggggtagacccagaccagcctttagtctagggctcacttagcctcactgctaaggcaacacccttcagaggattctaccgaataccctgtgtttttgaggtctgtccactctttttttttttttttttttgggacggagtcttgctctgtcgcccaggctggagtgcagtggcacaatctcagctcactgcaagctctgcctcccgggttcatgccattctcctgcctcagcctcccgagttgctgggactacaggtgcctgccaccatgcctggctaattttttgtatttttagtagagacggggtttcaccatgttagccgggatggtctcgatctcctgacctcatggtgatccgcccgcctcggcctcccaaagtgctgggattacaggcttgagccaccgcgcccggccaaggtctgtccactcttgctggtgggaatgtgaactctgtctggccctgtgtgtgctccacagattgttgggcctgttgctttccagtggttcttttctcagtcttgtggatttcaccccactggtgtgcagatcagccagagagtctgggtactcttctcgaagtctcttcgcactctctgctctcctctcctctctggtattctgccctaagaatcttagctgcatgaactctaattcctgtctcctcaacttggtgagacctctggactccatttggattcctgttgtctgaactgctgcgtggaagctgcctccaggaagtaagctggacaatcagaggacttgcctgttttgttccattcgtctgtcagggattgcagtcctgtgttgcctgttgcccgatgtctgaagtagtttcgtgtgttctgtccaatttttcagttgttttaggtgggacggtaagtccagaccttgtggctttaccagggctgtccccgggagtcctgcattatttgaagactcaccccaggcatcacctcatttcctggtgtcatccttctgcactggggtgggtgcctctaggaaacactcctacaagaacccataagcagcatgttcttttccccttacttaatttatctagctttgttgttatctctctaagttggctgtgtctttgagtacaaagatgatatggtgtttttctcattatcccttgtacctagctcagtgctaggtggccaatgtttgttgattgaacaagtaaatgagaataaatggaagacaatataagtgaaccatgcttcatggttactaagaagaacagtaccatcccgggtgtggagcttgggctcccaggagctcagatcacacctgtagcattgggtttacttaattctggttggggcattggcaagtctgaagtcatctggaggagggtgactgggagaacggaaactacactccataggaattggatgaaggatttgggaatgttcattctgttgggaaattgtcttttatggagtactattggaggggggcataataacagttttccaacatgtgtaggattgaggactgaacttaggactcttggtgaaggattctaggccattagatttgggtctaggtccaggaagaactttctgaaaattgaaccatccagcagagaaatgggtaccttgaagatagtgagctccctgttgctgctgggatttaagccaaacccacgtctgttgcttagggatgctgtgtttggagttgtaaagttaaccaagatgttgcatgagatatctcttagatgccactctacacaattttggatcttactcctcctctgagccccatgattcatcctctggcagcctcccatccccagcctacacacacatccagaaaacacacctggaatgtgctccttactactgttttatgaaacaagcaccccttgtttcctgcctaaagtggattcttctcgggcctcacggactggctgctaccacccctgggcggtgtctgtgctcatctccatccttctgacttcggcctgactggcaccccattgatctgggtcagccccttctgtcagcaccttgtcccattgtctcctgtgtctggagacacagtgcctttgagacagaggatggctctgattagcccgttgttttccctgctccctggtggctgggaggctcccagcgaagcctggcggccttgctgcagccattccactgctcaggaatatggctctgaatggatactgtcacccttgatctgttcatccgctcctttctctgggtctcatgtctcttcccctagggtctttcttttcctcggactggaagctcctgaggaggtgtcaccccactgggtcaaggatggtttgctgcacattgtagaggctcagttagtagtggtgctggcagaactcttgagagaatcttgcacgcacctgctctttccccctgcctttttttctttttctttttttttgagttgggacctcattctgttgctcaggctggactactgtagtgtgatcatgactcactgcaacttctgactcctgggttcaagcgatccttctgcctcaccctcctaagtagctgggactgcaagctcatgccatcatgccctgccaacatttttaaaatttttttgtagaggcggagtcttgctattttgcccaggctggtctcgaactcctggcctgaagtgatccttttgccttggctcccaaagtgctggggttacaggtataagctgcttaccctggccaaggaggaattttttttttttttttttagacagagtcttgctctgtcacctaggctggagtgcagtggcgcgatctcagctcactacaagctccgcctcccaccaggttcatgccattctcctgcctcagcctcctgagtagctgggactacaggcgcccgccaccacgcccggctaattttttgtatttttagtagagatggggtttcaccatgttagccaggatggtctcgatctcctgacctcgtgatccgaccgcctcggccttccaaagtgctgggattacaggcgtgagccactgcgcctggccccagggaggaatgtttttttgagagctattgcacagcatggtgactacagtaaataataacatgttgcatatttcaaaattggatctggaacagaggtcacttaacccatatttgtggactgaatgagtgagccccagagagggacatcccagtgtccaggtggccaggacagtgttccacccaacctgcccatcttttgaatgaggaagatgaactcacgaggtgaagccatgtgctccaggccacttgctgttaggtgggagagcctgtctagaaacctacatgttctgcctcctagtttccagctggctcccttgggggatgtcaagacagtaataaaaacatgatataatcccagtcagcgttgaccaagtacattctgtcgtgatgtgcagagttttgtcctacttcttaaaatgcactcactgaaaagagatttcctgagcctgttctctattccccttggctgccgtcaccagttcctgcctcagaacacacttgccctcaatgtgactatgatgaaaatatattcactatttttgtcagcctcgtccgcggtagctgttgtctgcatgctgttttaggtcaactaatattttactgaggattcttatgttggttatctttccattcctcacgtgcttatctgtatgggatttgctcacttatgctttagctgaacactcattgaacacttctggtgtgcaggcaggctctaggaaccagggactcagtggtgaatcggactggacgtgcccacctggggacctcaaaggtccctaaactgggactgcaagttggcctgggggatgctgctgggagaaatcattttggggtctttgtctctgtagggctccccaccatgccatgcacgaacatgtattcctagacactgctcctgttgtctcttggctgtgactttgggaagtggctgggatgaggcagccaccagcctcaaaggactagcacctggagagtgggaaagtgggcttagggcttgtgtttctggtcccagcctctgcttggttcacactaagtgtcctcagcctcatcccacagatatttgaagggctcctctggccaagcactgctcccggctctggggctgcaggagtgaggaaaaatccctgccctcaagagctcatatgttggtggaggagacagacaatgaaaattggtgtatatcaggaggtggcaaatgctatggaggacagtaaagcagggcgggacgggaggatgaggcggggtcagggagccgtgaaggcgttactgaggagctggcatttcaggagagactggaagacagggagggagtgaacctgtgaacatcttggggtggtgcctcctggggcagcgggagtaggaggtgggagcacatgaggcctgttcaaggctggtacagctggaggggagtgagcaaggggaaggtcatgggatttggattatctaggccatcttaggggctttagctcttatggcagaagagatgggagccatggagggctttgagcaaaggagtgggagagctggcatacatttcaaaaggattgctgtggctgctcggtagaaaatcggtaagtgacagtagcagtactaataactgttttttttttttaattgttgttgttgttttgaggtagggtctcactctgtcacccaggctggagtccggtggcatgatcatggctcactgaagcctcaacctcctgggttcaagagatcctcccacctcagcctcctgagtagctgggactgtaagcatgtaccaccacgcctggttaatttttgcattttttgtagaaatgggggtcttgctatgttgcccaggttggtttcgaactcctgggctcaagcattcctcctgcctcagcctcccaaagtgctgggattacaggcgtgagccactgcgcctggcctctaatcactgttagctaccaagtgcttatcgtgtgcctggctcggtgcagactctttgtggcacctcatttaatccgcccagcaactttactccaatttacttagcaagaagttcagagaaagtaaacattttgtccgaggatacagagctaaaaggtggtggagccagctgtcagcttaggtcaggcaggttccaaaggttgtgccctggactcttgtccatatttccagagcaaaagggccggtcatttaggacaacagtggacaggcgtgtgggggtgatgggcagggggaccctgttcctgttgtttggctgctctcaggcgttcagctggtcaccctgggagaggggtgagggcaggccctctgctttaactcacttgtgtggtaggaggaaaagcaaattgtttccagatgaggggaggctgcctggggagtggaatttgtgccccgtctgcgcacagcagcctctctgggcctacaggaccctgtgtctttgtgttcagacaagccctgctgtgtagaggcctgagctttctgccgccgacttgggctcagtgccccgaggcaggcagatggaggagtgcggcagatgtgccgtcctctcccaggggagggaagctccttctgtttccgagtgaagtctgggccaacatgccccgtattttacctatccctttccttctaagtagttcagatcactttcagaacgtcacttccataatccttatatttattgctccctgaggaagtaaggaagatatttttccttgtcttaaaaaaaaaaaaaaaagctacaggctggaaaaattggggtcagagagtaaggctggggtggagcaagggagggaacccaggagcctaggcctctgtgcagcttgccttgagaggggcagggagggaagaggcgagctgagcgggaaacaggggcttctggatttgggggtgcttccttttctgttaaccatgtgctttggtgtctgaatcccggtggggtgagggtccctgccctacctagtagctgtctcaaggagtgtacatgcccctgggggcctagggcctgctttgtgtgcacgcgcgtgcacacacacactcacacacacgcacacacgcgcacgcacacacgctcatacacactcacgcacacatgcgcacacacgcacacgcgcacacacactttcatacacacgctcacacacgttcacacacacacgctcacacacacatgcacacatggtcacgggcactcatgttctcaggtgtgcttggtcccatccacactcatcaccgcctcccttaccctcacgtgctcattcgtatgtgcagcgcacactcagtcttgcacacacacactcatatacccccttacccctcacccactccatcctcaccccatgtgcacctacacatagcatgcacactcgctcttgtgcgcgcacgcacacacacacatgcctgcccatgctgtggctctcacacacacgtgcgtgattggttagttcgcctgtgcatatacccacctatgcccacagggaggtgtttgggggacacatgtcagagacgggcaccaacagctggcagctgacttggcatgggagtttctgacagtggtggagtcccacaataatggcttttagcttaccacatcctgtgcctcagtttacccctcttgtataatagagagagcttggagagactgaggacacaggagacacaggtggttgagtgttctgagatctgcagactgggaggcattatgcctgtaaaatgtaaagttaacaaaggcagaaactggtggtgggaagtggaggaggtccttaaaaagaaagatgggactgggcctggtggctcacgcctgtaatcccagcgcttggggaggctgagacagaaggatcacttgagcccagaaatttgagttcaccctcagcaacataatgagaaccctgtctctgcaaaaaataaaaaaattggccacacggggtggcatgtgcctgtagtcacagctgcttgggaggttgaggtggggggatcacctgagcccaggagttcgagtctgcagtgagccgtgacggtgccactgcactccagcctgggcaacagagtgagaccctgtctcgacaaaacaaaacaaaacaaaacagtaaaagaggtgcccctccctaggcttcctggctatatagcgccaggctgcagctggcttctcaagctcaggctgactgtcttcaccgaccttgaatatgtaccatcagcaaaaccaagaccttggctgcagagctcttggggccctggggatggagggtgcattggtcagtagggtggaaaaggaccattttgggaaggaaaggctccctcctggctgctcagatcccagcgggtttccagccacagaagcaaagcaaacaggcccctgactttgtttctatttcagaaaccttgccgccaccaccaccactgctgccaccgcagagcacgaaatcatcacggggctgtggaaatccaattagacttgagccgccggcggccccctccgtggggagtgggggagggaggctctatctagaaagctgcctccataaatttgagttagagtggtggaggggccagactgttactcatccttgactgtttcttctgacctcgaaatccagcgagtgaaaatctgcgtgaaaacctgaggtctgccaggcggcactgcagggggcgggagtggcctggaggctgagatgagatccccagcctgtttggctgcctgatgggttgactcagggccttcgttcccagtctttgggcctgggatctttctgagccttaaatctctgggtttcacaggctggggtgaggagagagggaccaaggacagcagacccccagtccagcccccctatccctgtgcccttcatctggggccatgcatgcctcttgttaggtctggctttccctttctgtttggggcactggcttcgtggtggcctcttccctgtgggactgccaagctgctgcaaggacctttaggtcacgcccagagacagccttttgcttcagtgtcctcattcttcaggctcagatgggctgtattttatttatttgtaaattaccttgttccagaaaaggtgatcaaaacaaatccagatacctggtgatatcgctagtgctacctgggcatgaattcattttttcctggcttgagtttcaaatgtcaactgggactcttgtctctgtccaggcccccaagcctttgcacatattcctgctccctggaccaacctcgtgctatttatactttcaactctattcctaaacccagtaagaaactccccaaaacctccatacctgatcctcacatttctggatactccttgtgtactcagtttagatgtcacctccctccactaactaagcgttcccctctgggtggagtgcctttcttgtgtaaccccatagcacctgtgctcacccctgtgctgaaggtattgaaaggaataagacacagtctctcctccagagtctgtggcgtagacagtgagtcatcggatgctacaatgtgctgtgataaatgtatcacagggacagtgcaatggaccacatagtaggtactctgtgaatatttgttggtcttgcaaatctgaaaaaactattcattctgcattcacacttccttgatattttggcttggtataggatctcagctaggttccagccccccgtcctgtgcaaagcattgcttaattttcttttaaattccagggttactctcaagaagtctaatgccattccagttttattcctttgaaggtagcatggcttttctctctggagtctctggtgtcccgtggaaaagtctctctgtctctagtgttctgctgtgtcacacatgacgtgatttagtgtggctcgactttcatccactgtggatcctttcgatcttgaaacacccactgtttagttcagggaaattttcttgagttacttcactgatggtctccttcccccgttttctcctttcttttggaactcatagaatttagatattaaatctcctggattggtcttacaattttattttctttcctatccccctcctttcctttcctggagatttcttccactttatcttccggccttctatcggggtttttattttagttagcagatttttaatttcaagaaattttgttttcgaagtatttgtcttttatagcacccttttggttttggtttcatgggtacaatatcattatcttatttgtctaaggatattaatgatagtttcattttgggaggaaggattcttttttttttttgagacagagtctcgctcttgcccaggctgcagtgcagtggcgcgatctccgctcactgcaagctccgcctctcgggtttacaccattctcctgtctcagcctcccgagtagctgggactacaggcactcgccaccacgcccggctaattttttgcatttttagtagagacgggggtttcaccgtgttagccaggatggtctcgatctcctgacctcgtgatccgcccgccttggcctcccagagtgctgggattacaggtgtgagccaccgctcctggccaggaggaaggattctttactgtttcatatagtctgtgtgtgtgtgtgtgtgtgtgtgtgtgtgtgagagagagtgtgtgtgtgtgtgtgtgtttgtgtgtgtattttctgtctttcctgtgaacattttcttcagaagtctagtgatccttggaagtctttacattttgagtgaggcattaaaaggtgattggaacttgtgtgtgtatgtcgcttgtggattctgggccttgtgtagggtgacctagttggcctgttttgttaggaacctagtaagttagtgccaggcatggtggctcatgcctgtaatcccagcactttgggaggccgaggagggtggatcacctgaggtcaggagtttgagaccagcctgggcaacatagtgaaacccgtctctactaaaaatacaaaaaattagccgggcatcgtggcaggcgcctgtaatcccagctactcaggaggctgaggcaggagaattgcttgaacctgggaggcggatgttgcagtcagccgagatcgcaccactgcactccagcctgggcaacaagagcaaaactctgtctcaaaaaaaaaaaaaaaaagactttttagggcataaaactacaattttaaagagaccagaggagttgatgatagcaacacaatcttagagactgtaggtaaaaggacagatgttaattggcttgtgaaagctgaatcctaaagcatcagcaaccctatgagcaccccagaacccccaaaaggcttagcaatctgcagcaccaggaggggctgaaaacaggaggtcaggttaaatgtctgcttaagaatcagtcccactccccagatctctgcccccgcttcccttagccaggtaagtgtccctcctccacctcagcacaagaccgggagtgggctttttctgtggagggggtaaagcaggaggtccttagtctgtggactgaggaaaccaggcccagggaagatagggtgttaggtttaagtacagaggccaagaccctgccctcttcctccataggctcctgggcacaggaattccgttttagatctccctggtagactagaaggttctgctctaggaaatattaacagctcaatacaaaatacctaggatactaatttacaaattttttaaagagacagggtctcttaaagccaccatgctggccaaaagtctcttttctcttgatttagtgaggtatggggcacagtggaggtaagtgtacccattctcttggagatctttggccaggacatagctggtgcatttacttgccttcatctgttgtttttaacagtccaatgggtgttttttttcagccttgtgggaaaggaacaaaagtccatttccttatgtctgtttgttgcaggatcctttgtgcctagagctgtgctggttacataggaggtcctcagtccttgctggctgaatgagtgaacacatgaatgaattgcaaaccgacttggaaacaaaaatgcaaacacaagcacagttcacccaggttcagactgttctgatgtgccagtcatttactgtaactctgaacatgttacatatgcaagtatttagcattgtttctggctagcggtggggacactgttgactttttcttcatcctggtttattttctctggctgtagtgaacatgtgttgattcttcaatttttaaccaggagttaaatgaacaaaaataaaaaagcatccagtttagaaaggaagcagcaacccaggcacagtcctacagcttttacaaccttctgcaggtcactctgtcgccgtagaccgtagttcttgttctgtaaaacaagtggttggaccggctgcatcgaaggtttcatccaggtgcgagtgctgggatgttgctgttgtcctctctcatttgtggcacaacggtgtaagtctcctgtggaaaagaactgctgtaccttcacttttctgggccagaatacctttcttctgctcctcctctgaattcttgtaccacttcagaacatagtccagatcctacctcctcgtaacacttctcagctgctccaggagatgcccgtcccctttcgccagcctcctttgacatttttggttcatagttggatatagaggaaggaggatagaacttgaggcctgacagtgccaggtttgaattttaattctgttacttgttcactgtgtgaccttggaaaactcacctagtatctctgagcttctcttttctcatctatctaaaagaaatttatcataaaacttacctgatgaggtttatgtgaggattaaatgagatatgtatttaaaactgctctcctttactgtgtgacacaaaatagatactaacacaaaaaatgataagaatgatcagtgtttacgtgcattaccttttttttttttttttttttgagacagagacagactctcactctgccgcccaggctggagtgcagtggtgcgatcttggcttactgcagcctccgctttcttggttcaaacaattcttgtgcctcagcctcctgagtagctggaattacaggtgtaattccacacctggctaatttttgtatttttagtagagacagggtttcatcatgttgaacaggctggtctcgaactcctgacctcaggtgatccacccgccttggcctcccaaggtgctgggattaccggcttcagccactgcactcagctgcattaccttttttactcacattgattatttttatctcaccatgaggaggctgagctgtaaagaggtaatttcctcaaggttacaaatcgaggacaggtcgcctttacattttctttaggtgttttgtgtttgtatttagtctgtgaatatttattgtctaggaatttatccgtttcttctaggtttttcaatttattggcatctagttgctattagtagtctctaatgagcctctgaatttctgtggtatcaattgtaatgttcctttttttttttttttttgagatggagtttcactcttgttgcccaggatggagtacaatggcacgatctcggctcactgcaaccttgcctcctgggttcaagcaattctcctgcctcagcctccttagtagctgggattacaggcatgcaccaccatgcccggctaattttgtagttttagtagagacggggtttctccatgttggtcaggctggtcgcaaactcccaacctcaggtgatcctcctgcctcagcctcccaaagtgctgggattacaggcataagccaccgcgcctggcctgtaatgttccatttttatctctgattttatttatttgggtcttctttttttttccttagtctggttaaaagtttgtcaattttgtttttttctagaattaaattatttctctttttatttaaaaaatttttgtaaaactgattttgtttcattgatcttttacatatatattttttattctcaatctcatttatttttgctttttttttttttttttttggagacagagtctcactctgtcacccaggctggagtgcagtgagtggtatgaccatagctcactgcagcctcgacctcttgggctcaagtgatcctcccatttcagactcccccgtagctggggctataggcacatgccaccacacctagctaatttttaatttttttgtagagataaggtttaactgttgcccaggttggtctcgaactcctggctcctgcaattctcctgccttggcctcctactcctaaagtgtggatattataggaatacaccattgtgcccagcctgtttccagaaattcttacatttccttcttaacttctatattgacccactgattgttcaggagctattcgatgaatatttattgagagctaactctatgtcaggtcatagtgctgggaatacagcagtgagaaaaacgaagttaccgccctcataagcttacattctaatgtaagagcccatcaagggaatacatgtctgttgggtagcgggaagtgtggtggagaaagggatggggtaaaggcctaggggctgtaaaagagggcatgtgtggtggggagggagagcatctccagtcagtcacatctgatggaccctgcaaaggatggagagagcatcctggtggatgcctggggaggctcattccaggcactgggaacacaagtgcaattatgtttgagtagtgggacccggctctgatcaggtcctgaggccatgatgagaaattgggcttgtttcttcaacttgctctttcctgttgaagtcaaaagatggcttctttcttattttgtgtcctgtactatattgggtaaataaagtgatgtgtactttgttaagtgatcaatagatacttttttggttgatgaactcttccatcttctatcatcttaggctgcctggtgtggggttgtactaggtgtatccgatggttctcagtccccttcccacattctccagtgacacagacctggagctgtgaaccccgggagaccctcaggggtgtgccagttcgagagtgccagctgccatgcatgccctgcccttcactctgccctgcagcctcagtgtccttttactcttctattgggccttgcgccctccctctttgaggttttgcaaatgtggctccctccatgtccccaggtccagaggcaagtccttctgcagggacgctgtctttgacccttggcctgggcaggtccccttgttccacgtgctcactgggcagtaggttcttcccctcccagcagcatttccccccatttatcattgtgtactcacttgtgtgatcctcagaccctgactgtcatcctcagtgggccataaaccccacgaggacttaatcatcccttctcctctcctgcatctctgacatctagctctgtgatcagccagtttcatctgtcaaggacctgactgtaaacatgttaggctttgcagaccatatggtctctgctgcagcttctcaaccctgtccttgcagcatagaagtggctgcagacactacgtaaatgaatgcagctgtgttccaaaaaatgtatttacggacattgaaatttaaatttcatgtcatttccacaccatgaatattctgcttttgattttttttcaaccttataaagtatagaaaccatttctagcaggcaggccatacagagacaggcgatgggctgtatttggcccacagactgtagtttgctgactcctcatgtagggcagtgcgtggtgtatagcatgtgtttaatgagtttgttgagtgagtgaatgacaccttagacactggcaggaggtggtgaatttgtggggtgctgtctttctcattaacaccataatcgctctccttcatcagattccctgcagtctggccaggcatggtggctcacacccagcactttgggaggctgaggcgggtggatcacctgaggccaggagttcgagaccagcctggccaatgtggtgaaaccccacctctactaaaaatacaaagattagccaggcatgatggtgggtgcctataagcccagctactcctgaggctgaggcaggagaatcgcttgaacccaggaggtggaggttgcagtgaaccgaggttgcgccattgcattccagcctgggtgacagagtgaggctccatctcaaaaaaaaaaaaaaaaaaagattccctgtaatctgataacattaaggaagaaggccaacaggtttgttttattgagatgttactcacataccatagagtttgtctatctgaagaggacagttcagtggtttttactatattctcagcgtgtgaccatcagcactgtcaattttagaacctttttatcacccccaaaagaaactccattagcaatcactcccatgccccccttccctgcccccagtttttctccctgtctgagtcaaccattaatgtatcttttgtctccatgatttacctaccctggacattcatatgaatggaattatacaatatgtggtcttctgtgactgacttcttccacttagcataaggttttcagggttcatctgtgttgtagcacgtgtcagaattccattcctttttagggctcagtaatattccagcatacggacagaccacattttgtttatctgtacccattcgtcattgactgacttgtgagttattaccaccttttctggcttagacataatgtggctgtgaagttcatgtgccatgcttttgtgtggccatatgttttcagttctcttgggcaaatacctgggagtggaattgcaggtggtcttagctcaggctgctgtatatcacaaagtcccacagactgggtggcttataaacaataggcatttatttatcccagttctggaggctgggggtcccagatcggggtgccagcatggtcaggtgctggtgaagccctcttctgggttctaaacttatatccttatgcagtggaaacagggcaagagagctctctgaggtcccttttaattagggcacaatcccattcctgaagtctccatcttcatgacctaatcacctcccaaaggccccacctgctaataccatcaccttggggcccaggatttcaacatgagaatattttggggacacaaatattcagtctgtagcactgggtcatacgataactgtgtgttgaactgtttaaagacttccagactgttttccaaagcagctgtaccgttttacattcccactagaagtgtgtgaggactccagtttctccacatccttgcagacaacctttatttttatttttttaacaaccctttttactgtctgtctttttgactggctaactacttcttaagcggacacatttctgattgcaagacagtgggctgaacttgatcatttagataaaagtttcgctattttcttttgtaaaagcaatgtatgtttattgagcattctgggaaaacaacttgatccctgctagtgatgtccctgttgcatttgatcacagcctgccaactctttaacaggtctctcaagaccaaggctgctgcccctataagctgcatagcagatcaggatgcaggccctggggcttcagactggggttcacaaacaagttctgctgctgcctggacatttgaccttagcaagctgcgaatcctctctgagtcacagttttctcattggtaaaagggatgtttttgggtacctaccatgtgatgacaggcatcgtacttgtcttactaggttctgatgaagatgaaacacggcaatgcttgtgaagtgctggggataatgcacttcctgagcacttagaataaacgatactcaaaaccgagaaagagccctccgtcctgaggtcacgcagctcggcagggcttgtgattgttgtaaggtaaagagaggcccttggaggaggaagggtccccgtaggtcaccctcacactggattcccgtcatgtggccagcatttgcttggctgtttctgctgatgagaactgccccctgctgctgcacagctcaggttttcagccctgcctttccggagccatcctttggccgtgcctctgccgtcagagcccgggagcgcgcgcctgccctgtcgtccgcatgacaacctgggagtatttgacaacagaacccctctgtctcttctccagttccatcagctgtttctcagataacttcatttctaaaccccactacctctgtggccgcccttggacgcattctggcttggtggttgtttgttgtttcctggactcatcctcagcccgaggtggctctgaggggtagagggacatccccataggggacagacacaaactgagtgtcagaagagttattaagcctttcagggtgacagatcttcacctttacaagcaggatggctttaggaaaggaagtagtcgagcaggatagatagtctcattctaaattatggaaaacataaaattccagctaaggcctgtccccatttcccctcctgttttccaggctgtcttgggtggctgcacagacggttcctcgtcatccaggtttcctgatgggtgttgcaagggtgacccattctgctggaagggcttgtgatgggagggttttgagttttcctgccgtcatttcctatcctgatagggcagagtcggtggtacattttttggactctgttttataagctgcaggagggagattgtggcgagtggctcattaataaaagcacttcagcagaaacagaacaaggggaggggagaggaagtggtgggactatttgcccgatttttgtatcctagggcctgtctcttccgttggtgggagaaatccaagtgcttagcggtccctctgctgctgcccgtggggtaaaaacctcatcattttgtaaagaggggcagcctggaaacccaccgtgggcccagctctgccccggggcaggcagcacacattctgggtatctcccacttcctcaggctgagttttggaaaggccatccctaatttctttgtaattgtgctccaggctgatttacataactttatttttctgtggttagttactcattcagaaattctcctgtccatctgttcttctgggaacctgagactatgggaacagcacatcccaggagaattctggcctgatttagggggttggagcagttgtccaatcccctgagcagatccaggtcccggacccctccagcgagaggaagcaccttgggaggcagtggctgctggtcctgggacctgcggagctgtcacctcagggctgggaggtgaagggaatggcctgaaggtggaggaggcatgtgtggtaagaggcagtgcagggaggtggttagtgccccatgccaggttcccctcctgggcctgccactctccagttatgtgacatgggaagctatttaagactctttttctcgcctgtgaagtggggattataaaggctctagttcacaaggttattcaaatgtgaagtgagttgatacgtgaagcatgtagaacccccccggcatgtagaaaatcctcatcctcatttccagcactaacagctgcattatcacatttacctgattccgcaccgcccctgcacccgccgttttttttttttttttttttttttgagatggagtcttgctctgttgcccaggctggagtgcagtggcatgatcctggctcgtgcaacctctgcctcctggattcaagtgattctcctgcctccgcctcccgagtagctgggatgacaggcacccaccatcatgcccggctaatttttgtatttttgtagagacggggttttaccatgttggccaagctggtctcgaacccctgacctcagatgatccgaccgccttggcctcccaaagtgttgggattacaggcatgagccaccgctcctggccagacccctctctgctcttttttttaatggaacagggatacttattttatatttattgacaaacatggggaaacattcctctcagctcagccccactgcacctgcagcccttggcctccttggcactccctccctgcagctgtgcccagtgggtctctcccactcccagccatggtgtgaattgggcttatgctgactgccaggtagcagcagcctaatttctctgcctagtttcatcatctgtgacctgtggaaaacatttacgcctccttttcttccctccggcccctccagagatgtgatgagggtcaggtgacatgttaagcctggcacgcaggttgcaaagacaggcaggacttcggtggacagtgtgggagagctgtgggcgcaggaccgagatcgccctgtccacagggaccctggagtatggatggagtagggtgaaaatggagcttagcaccgcctttgggacactatcagcagatgcaaccccttgggctgtacccccgacagcgaaggtaggggaatgttgtttagaaagtcagtccacaaatgggtattctccaagctggttccctgaccccacactggacaagctgctatgctctctgccctcaggatgcttataaagtggccaagggtggataagataccaggagggaagtctcagtggtttgaataaccagcagttcctgctttacctttgatgcatcaggtgctgcactagacatctacttataggtgagaaaaacaaggctcggggggttcactgactccccagggtcatccagtttggatgccagaaaagggatgtaaactcaaatctggggcattccaaagtccgtgttctttccaggtggggaaacttgggtctgagcttcgccaggcctgctgggactcccagatcagcccctgccttccaggagctccgttgtgaaatgcccttgcccgtgtgatgtttgtgtgtgcttttttctgcaggaagtcttggccttctctccctccccatcctctcagcccgtcctgcccctgcccggagggctgtgtgcttcactggagggcctctctgctgtgaatgcacccccgctcctctccactgaccacatcctgtgcaccccgcttctcccttctttcaggtcacctcctttgatttggggaagggagtgagccattggcaggtgagagaaacctgtgctgaaaggtgtgggtgactttgggcttttgctcctgtggggaggtgttggctcttcccaggtgagaatatgccctagcccaggttgggctagggcaggaggggaagtacggtgccctgtcactcaaagggcacgggcctggccgccagcgccccggagtctggtgttgctccacatgggctggctgtgtgaccatgtgcacgtcactctgctttctgggcctgggtgcctctctgtagcgcaaggagttcgtgccagatgatcctggaggtcctttcagcccagcagttccgcggtttcagatgcctgcttgggaaattcattgcccactcgttccctcttcctttcctctgttgcctctttaaaatgaaggtttacttttcagctggtgttaattggaaagctttaatgtatgctttggaatgagtgggaggaattccaaggccataactccctgagccctcaagcgtggaaagttttttagtaagaacgagttcgaacaggatcttgggggcctggggacaggacacaaccttggcgtgctcattcacctcagggaacacagctggctctttggaacctggctgattaaacctggcaggacctgggtgacagaaacccagcagggccagagctcctctgtctggggacccttgtgccaccagcagccacagccttcccctggagcctgctctccccactcctgtgccagcccgtcactctctcttccccagctgtgccagccctcactctggccctgccccaaatacacgtcatgtccctctggcttgccttctttagctcagcccttccctgtcccctcctcatctctctacctattgatgtcacctctttccttttatgcccagcgtttcctttccactagcccaggttgggctagggcaggaagttgagcttggcacgggcctgggccagggaccacatacagtgtaaactggactgtggggctgggagggctaggggagcattgccgctgatcagtcagtcagttaatgttgaccaagcccccatcacctgcccgaggtgaggccgagctcttccagtgaatgaaaaagatgtacacacagcacttcccttgggggagctacccataatggggtagaccagcccccaggagggacccttacggagtggtgggtgataaactgcttctgtaagtcagagaggcggcttgggccttcagaactcaggtgggagtcagtaggcctgggtccagcctgccactggccactggctcctttgcaggttgtggctcagtcacaggacctgtctgagtttcatcttgtggaatgagaaggttggggtgggtcttcctgaagtcccttccaactctgcatagttaatagtcaccatttatcaagtgctttctgtgtgtcaggcggtgtgaaatgcttgacagacctaatcccatctcattctcccagagcgaggctcttttatttgccctcattttgcagatctcaggcttagagctgaggttgcaatccagtggcctctaggtctgatccaggccacagatgcgttttgtttgggcgcagctgacatactggagagatttttcaaaacaggggatgttggctttttttttttttttttttttttttgagacaggttcttgctctgttgcccaggccagagtgcagtggtgtgatcacagctcattacagcctcgacctcccaaactcaagtgatcctcccacctcagcctcctgagtagctgggaccacaggcacatgccaccatatctggctaattaaaactttttttttttttttttttttttttgtagagacaaggcctcactatgttttccaggctggtctcaaactcctgagctcaagtgatcctcctgccttggcctcccaaagtgctagggttatagatatgagccactgcacctggctgatgttggctttttaaagttggaaggtctagttacactgagcctgtgctgcccggtggcaacaattggctggatctggctctcaggcaccacctccacatggggctgtgctttcctgacccctcagtcttgacacagtactgggacttgcccttgtacacagtaacttcatgaatttatgttttccaccttgtaggtacttgagtttgcaaaccttgactgaaggctgtgatgttatactgtatcagtcacacagctactgttagggacagtgttccagcttgagtctgtctgactttaaactgtgaaccatcctgctgtttttctgagttctcccctcccctcccctcgttttttgtcttaaaaagagatagagttggccgggcgcgtggctcacgcctgtaatcccagcactttgggaggccgaggcaggcagatcacgaggtcaggagatcgagaccatcctagctaacacagtgaaaccccatttctactaaaaatacaaaaattagccgggtgtggtggtgggtgcctgtagtcctagctactcaggaggctgaggcaggagaatggcgtgaacccgggaggtggagcttgcagtgagcctgcactccagcctgggcgacagagtgagactctatctcaaaaaaaaaaaggagatagagtcttgctctgtcacccaggctggtgtgcagtagcacaatcatagctcactgcagcgttgatcggctgagtagctaggacttcaggcacacaccaccatgcttggcaaattaaaattttttttgtttgtatgttgtccaggctggtctcaaactggtctccttctgtcttggcctcctaaagtgctgggattacaggtgtgagataccacacctggccctgagttatttctaaatcctagcagggattttgaatcttttgtctgagcctaggagaccatagataaggaagttggcaagaacccctcttaacagagaggtttgagtccccgcatctgtctgaatgtgctcctgcagggaggtggcgtccacttttggatgttgctcatgttttagtccagagaaaaactgtcctcttgctacacagtatgtcctttctgaattaattaaatgtcattgttttttctctaccacttgttttcctacaccttggtttctatttactggcaggttgaaagcaggtgaccccgcctccttgcccctaggagggctgccaaaatgccaaacagagagcttgcgttttgccccaggcacttggaggcaggaaacagggatgtctgtttggacagtggatgcttcagggttggtcaggggtccctgggggagaggcaggcaggatgctaggcctcccaaacagggaggcggccccacagggagccctggtggagcttgaggcttcctgcatttagtgttggtctgtccagctgtttcctcctgatagagtggctggacaatgccacagtgactcaactccagccccgtcgacgaacaacaggagatttgtccagggttagctcgggagtggcgtctgcatccctcacctgcatccaagctgctagttgggaggaacctgttgctccttgaaccgcttccctgcttactcttggtgccctagagccctgtcccagttggattgattcaggctgtttctttttgatttccctgtagcttgtccttaacccttctttgtgcacagctgacctagagcttctgtggctctgtgctgaccagctgcccgcctgccgtcccaagcctggcattgccagacctcccttgcccttggcctgaggctcagtgggtttggcacagtccccgaaggttctgagtctctctccaggcattcagggcctgggcgagcttcagatgagagagacagctgtatgattcattaatctcctccagtgtgtggaggattaaacaattttttggtgggtttattattatgtattttttttttttgggaaaaattattacttattgagtattttctaaggctcctgtcatggttactaagagctttgcatgcattacctaccttaatccttgcaggcactctctgggagagggatggttactcccattttacagatgagtctgaagtccaagaggctagggagcttgcccaaggtctcagatccttcccacttcgtatcctgtgacacatgagttagggagggatgaggatgtgcggaagagtttaaaaaatagtttgagaactgttgatgaaggatgagaggtttaaaaggagctgtgcagggaggaggcagaggtgagccgggcttggtccttgcactcctggagtgcgggaagcaggcaggccaccagctgcctctgatgtaagatacaatgtggttggtgctagcagtggagctgccagggtagtttggaagcacattttcagctggtatatgagcaactagtagaagacacttcaaaacagaagtgagaaattcctggcgcacagaacggatttatctgtcagcatgacttaaactgtccatgtagaaaatactgagatatagtcccatttatgtctagagttgcaaaaatgcaacattgcttagaattatttttagtgcaattatttggaagtttatatcaaaggccttagaaacattcattcataattctgttctttggagtttataccaaagtagttatattttttcattgcagcactatttatagtagctaaaaattggaagcatactgaatgtctaacaatagaaaattagttatataaattttgatacattcttttttttttttggatggagttttgctcttgttgcccaggctggagtgcaatggcttgatctcgtgggttcaagcaattctcctgcctcagcctcctgagtagctgggattacaggcatgcacaaccaacacgcgtggctaattttggatttttagtagagacagggtttctctatgttgatcaggcttatcttgaactcccaacctcaggtgatccgcctgcctcgacctcccaaagtgctgggattacaggtgtgagccaccgcgcccagcctgatggaccactgtgtgggcttttaaaaattatgtcttcaagaattatatataatgactcaaaataggccaggtgtggtggctcacatctgtaatcccagcattttgggaggctgaggcaggaggatcgcttgagcccaggagttcgagaccagcctaggcaacatagtgagacccctgtctctacaaaaaaatttttaataaattagtcaggtataggggtgtgcctctgtggttccagctactcaggaggctgaggtgggaggattactcaagcctgggaggtggaggctgcagtgagctatgatcatgccattgtgctttagcctgggtgacagagtgagaccctgtctctgaaaaaacaaaacaaaataacattaatgaaaaaatgtcaagcaaatattgtaagatataacactacaaatcctaattttttttaaaaaagaagaaaggttagaggaaatacaccaaaaatgctaatggtagttcgtgattattagtgatttttttttttttatgttatgtacttgctaacatttctctagtgaaccacaacaacaaaaacatcagaagtgctttggtgtctcagaggattgcagagtgttttgctgcgtgctcagcacagcacctttcattgcaaaacaggctccagcactttccagaacagggctttaagtgtacttgggagatgaggcctctgcattggagttccttcttcctctcctctaacacattcttccccccgcagttttctcccttaattggatgtaaatttacaactaaataattatttttaaaaaataggtactgttcttattggctgtttttccgaatactctgatgagagagacatttcatatttttcactctataagaagaccctaatttaaggttctttcttctcatggaatttaattgattttttttctctgtggttcagatgatgtttgtcagatagaagaatttgcgactcctgccttaaatggcctttgaaagcccaatgtaaaatagtgccttgttgttgtggcctgctgggtgacaccagggcagcctggtgtcaccacagaggaatggttctgtggctgacaatacgtttgaaactgaccctcaagtgagcccagagaacacttgtgatcatagcccaagaacagcctttttgtttgtgtttcatggattatgaacgaggactcagcacatcgcctggcatttgagggctcaaaacctgttgtttggatgaatgctggcctttgtggcaatattccctcccaacaatagagacttctgttgcgtttgttgtgttcaagtgtctagtgaaaatgctctcctatagtggttgagaaagtaagttttggatgagagattcagatcctggctcactagtgtagtgactgtgaacacttctcttaaccttttgcagcttcactttcctcctctgtcaaatgcataagacctcacagggatgttgtgagggttaagggagagtacttacaaaatgcttaataagggatcgataactatacagtcacgtgttgcttcacgactgggctgtgttctgggaaatgcactgttaggtgattttgttgttgcgtgaacatcagagtgcacttacacaaacctggatggtatggcctacggcacacctaggctctagggaagagccttttgctcctaggctacaaacttgtacagcatgcttctgtgctgaatactgtaggcaattctaacacaagagtgtttgtgtgtctatacgctggagctgccagagtgatttggatatgtgtacctttaccgcaccttttctatgtgtacactaaaaatacagtataaaagatttaaagtggtacccctgtattaggctgttcttgcactgctataaagaaatacctgagactgggtaatttataaggacagagatttgggccaggcctgggggctcacacctgtaatcccaacactttgggaggcggaggcaggaggatcccttgagcccaggaaattgagactagcctgggcaacatagtgagaccctgtctctacaaaaactacctgtagccctaactacttgggaggctgaagtgggaggattgcttgagtgtaggaggtggaggaggctgcaatgagctgggattgcaccactgcactccagcttgggcacctgagtgagaccctgtctcaaacaaacaaacaaaacaacaacaaaaaagatttaattgactcatggttctgcaggtgatacaggaagcaaaaaaaattcatggagtctcgctgtgttgcccaggctggactcgaattcctggatcaagtgatccttctacctttgcctcccaagtagctgggactacaggcttggtagcatgtccaacttgtgctagactacactaaatttataaatttatataaatatttttctggccaggtgtggaggctcacgactataatcccagcactttgggaggctgaggcaggaggatcacttgagcccaggagttggagaccagcctgggcaacatagtgagacctctacatcttgtcccgctggaaggtcttcaggggcaatacataacggagctgtcgtctcctgtgacaacagtgccttctggataccttgtaaaggacctgcttgaggccgttttacttaactttaaagaaaaatttttttttttttgagacggagtcttgcactcttgcccaggctggagtgcaggggcgcaatctcggctcactgcaagctccgtctcctgggttcacgccattctcctgcctcagcctcccgagcagctgggactacaggcgcctgccacgatgcccggctaattttttgtatttttagtagagatggggtttcaccgtgttagccagggtggtcttgatctcctgaccttgtgatccacctgcctcggcctcccaaagtgctgggattacaggtgtgagccaccgcacccagccactttaaagaaaattaattaaaggcatatactctaaaataatggtaaaagtatagtatagcaaatacataaaccagtaacatagttgtttattattcttaagtattatgtactgtccataattgtatgtgctgtggtagacatatttttaaaaaattcatggggtcttgctatgttgcccaggttagactcgaactcctgggctcaagtgatccttccacctccaccttcgtattagctgggactacaggcttggtggcatgcccaccttgtggtagacatttttacacgactggcagtgcagtgggcttgtttacatcagcatcaccacacacacgtcaagactgtgtgttgttggattacgacacctatgatgtcactgggcggtaggaatttttcagctccgttgtaatcttaggggaccactgtcgtatgtgtggtccgtcattggctgaagcattgttatgtggtgcatgatggtactaccgatattacaatattgttatttttggcagagaggtttttcccattcttgtctctgttctcaagttgtttggggtggcagactgagccagggatgtggttcagtgtccattatctcatagatccagggccctgaccactttttctccagctccacctgtaggatgccctccttttgggcctgcaaacacaaaatggctaatctcactgactttcttggatattcaagctcagtgggaaatgaactttcaaaacacagaaggcgtgatttcagagtgtcttcaagggggccttacacacaaaaggaggctgggcgtggtggtgcagctgtagtcccagctacccaggaagccaaggcaggaggattgcttgagcccagaagttcaagaccagcctgggcaacatagtgagaccctgtctcaacccctgccccaacaaaagccccacgaaaggctgaattacccatagccccccaagaaataccttcctggctttatggtgagtcaggcacccctgcactctgcacgaggctgcctgggtaaccactctgttcctcactaaaaggaaagactaaacactttgagattcagcacctcatcacatcaccatcattatattttggaattttttattgtgaaatatacgcaacataaaattgaccatttcaaccatttttaactgacattaagtacatatacattattgtgcaatcatcacactatctcttttcacaactttttcatcatcccacactgacactgtgcacccattagatgataacttcccattctccccctacttccagcccctggttatcatcatccattttctggctatgaattggattattccaggtacctcatgtaagtggaatcatgcaatattgaacctttcgtgactggcttacttcacttagcattgtaccctcaaggttcatccatgctgtagcctgtgtcagatttcctccctttttatggctgagtaatattccattgtgtgtatatgccacatttttttgcccttttacccagtgatggacatttgggtgtttctaccttttggctattgtgcagcatcgtattttaaaatcgagtgcccactcttctcctctccagtcactccagtggctccccactgcctgcacacccacccacaggactttgcacaaccgaaatggatgcacgtgttagtaatgtgacatgtgttttccgaggtagtttttctatgcattggatccgtctatccatcccctttatgaagctgtaaatgctcaaaggttaggagctaagattaatagttccttctactacctcctgagagtctgtttcaggaagtggtaaaggatgttggttaggagtgtgggttgtgaggtcagaccacatgggtttgcatcctaattccaccacacacaagctcgtcatcacatgtatcccttaactctttggcactcaatttgtccacttatgaaatggtgatgttggtggtaactaccttgtagggctgttaagaacattaaatgagataatccatgtataggacttggcctagtgtctgatacattgtaagcccttgaatgttagcttaagcaaaaattaagagctcagcttcctttcagcatttgcctttttcatcttcataattcccttgctgggcagctcaagggtaggatgaacggttcctgccgtgtggagtggcgtccctggggccagctgtccctcggggaagcagtgacgggagcctggcagaggtagaaccctgtttattgttcatccctgaccaacccctccatgccctctgtgcattcagatatcaggtgtacttggaggtgcccaggcccctgggtcttctttgatccctccctgcatcctctttcttgcgtggatcaccgatgtgtgggacaaacttggcaacttgggaaggtctctgggcggctgtaccgcctctttggccctctccaggatagtgctgttggggtggccagagggtcgcttcccttctacttccgcttcccccggtggccagccctgccccaccagcctgggaaacctgattcctcctgccctcagtgccagcgcactggcaggatctggctgggcatttggcagccgcttgaagcagcctgcggtttcgccctaaagctgatcgagctggtgaaaacggaagttccccatttttccccctctatttaacaacatttccccaaatgtttacttgatcctctcatgttttcttgttcgcgtcagctactagctttccgcttgctggccacagcaaggcagggagaggtttgctgctgcttggggctgattttctgctctggaaaggcatctccaggtgtgacggacagcagagggtgggagctgggcagatggtgtctggaggcaacaccccaaagtcaggtgactgcatccaggtgatagggcttctcgggactggcctggggcagggtggcagagtgggcccttcctaactgcgtgacctcgggcaagctcctgaacctctttcggcttctgctgcctcaccagtgagatggggataataatagtaccggcccacagagatgtgcagagtcagtgagataacctacacaaaacgcttagcagagtgtctggcacacacggccgtgctctaaaaatgtgagttacttctatttttaccggcaaactttatttttgctgttttccagccttctgtttctttgcacattttctttttttgtggcgaccttgattcctttaggatcccagtgctcttggatcactcccttcttgcttctagcaaagcccactctcgggaaggggtcttacgttgtagccgcatcggatttcaagggcagaaccttcaaggtcgttggggccagtgcccgtgtggtatttgtttttgctgagcggctctttgctgtgctgcatctcctcgcctcctttgacggggtacacacgctctacctgctgagacagtctcctccatctttgtcattttctccacttttggggaaaaaaaaaaagaaaccggatgtttatggagccctttacgtgccaggagctgctgggcacagtcatctcatttcattgtcccagccggccttcgaggttggtggtgttaattgcagtttttacccaggcaccgcgtggttgagtaaatagccagaggtcacatgcaagcaagcgacagtgggacttggttgagcctggacatgccgaagctgcggcccacgttctctgcgctgatggtggcgtacagcagcagccagttgcacaggtgctcccattaggatctcagcccctgcacttactggatgcctgtgggccagttacctaccttctccagcctcattttcttcacccgaaactgggggcagtcccatctacctcctagggctgttgtgggtatgaagtgagaaaatcctctaatgctgatgaaagcttctggcctgaccgtggcaggtgtgcagggaatgctggctgtgatgtgtgctgtgatgctggagcttggcttccgggaggttccatactctgggaacttgcaggacaggtcctgtccttggaccctcgtcggataggccctcaggtgtttgttaccaggtattgtgtccttcccaaagtcctcgcaattttttaaaaacattttttttcttgtggtaaaatacatacaaaatatatcattataaccattttaaagtgtgtaattcgatggcatttactacgttcaccgtgtttgtaaaaccatcaccactacttgcttccatggcttcttcatcaccctgactatgaatcctgcaccccttacctgtgaccccccaggcctctcaccactggcaaccactgatctgctttctatctgtggatttgcctctcctggacatttcgtgtaaatagaatcatacagtatgtggccttctgtgtctggcttcctgcacttagcgtattttcaaggctcacgcatgctgtagtgtgcatcagtacttcattctttgtaaggctgaatactactccattatacctatgtgcaatattttgtttttctgttcttctgttgatggacatttgggttgtttccacctttgggctgttgtaaatagagctgctatgaacattcatgcacaagcttttgtttggacacctgtttgcaattcttttgagcatatacctaggagaagaattgctggatcatatggtaattctatgttttaacattttgaggaacagccaaactgttttccacagcggctgtaccactttacatccctgccggcaacgcatgagggttccaatttctccacatccttgccaacacttgttattttcctttttaaaaaaattatggccatcctagatgtgaagtggtatcttactgtgctttgatttgcattccctgatggaccatgacatggagcattctccttcagttcccgcattcctgttttctcctgacccggtttgagtctctcccactgttctgttcatgcttctcaacatgtggccccatttgtctagatcctgtttaaaacaccaggccccagggcaggcctccagctaggttgggcgaagcctggcgtggacgactcccacttccctggttccagatatttgactttttcctattcagtctcctctgaaaggcgccacccctccccagcccatgaagcttcccaggctcaggttctcccatccctagtggaccggtggctctcagcctcatcgtccccaccgcccgcctgtcaggtaggtcagggtgaggacaggcgccaccctgaggccgccacagagctcctccccgtcacctttggggccattaggaagcggtcaggtcctgcctcctccagattgtctcgagaggcgttgtaagagcctcactccccaacaccagcaagcttgctcccttggagtatgacttgaaggcaccattttatgtcttttgggtgggtttacggtttcaggcctatttctaactggaatcaaagactgtccctcggtgaaggaatttcaggcacgaatgagcagatgcgtgaggtattttgggggcagagagtttgtccctgtgctccagaaaccactccaccatctgcctccgtgcacaggccccacccatcccggaaaaagaggggtcctctcctcccacttcagggctctgtcccgggaggcctggtctgtctcaccaggcacttcctacaagtacacagtttggtcatctgccagcagtctgtctgtctaaagtgtttatttactttaaaataagactcaattattatataatttttttttgctgtaaaaaataaaataacataaaagtatcagtaaaatgtgaggccccattcctatgcccctctcccagccccagggaccctcccaggggaaatcacaggagagccttggtatgtattcagaatccttccaggcctttcattccaatgcagtcatcttccccccaccctcatctaagggcagctccaaaacagacaacaccagcaggctgagtgtaccaaagaaaacaaggtcagtgccctaaaatgatgctgcttgaagttggatgagcaggtggtttttttctccccaggtggctctgctcaactctggtgtgcaaacttgaataaggggtgactggggaaggaaaccagagtgcagagggtggaggtttccaaagaaacaggtcctgtgaaaatggatggatgacggggaggagaggaaattggcattagcatcacctcttgatcacccaccatggcacggggtaatggccagacagccacccaggcgcagtttctagcttgacactggctttgcatcttttggtgaaggtaagttattgaacccccctgggtctcagtttctttgattataaacagggtcagcgcttagggctgttgtgagggactgattcttggaacagccccttagaaggtgtgtaatgtaagggttgccgtcccgatcttgcagggtgtcaggctccaggctggtgctttgcttcctgtgtcagctcagcatggatgcttggccttcctcgtcagcctttcccgccgtggactgtggctaaagcagagctcagtaggtcgcattgctaaaaacaggcaccccactcccaggatttgggtgtttagtgtgtttttactgtgtgaatgaatgggtgatgggttgagactttctcctctccgaagatgagagtattgtgggaacagttacacaattaaaggtcactggcactttagcaggaattagtgtcatagagattttgacctgaaagggacccgagatgatcattcattgtataaatggggaactttgaaggttcaaggagggaagaaacttgccagtcatgtcatacagccagttaggggatggtcaaggctggagcccagctcccctcattctgtctgtcctgcctcatatctgcaagggtctgcttgcctccgctcggggctgctgctttggggtggaaggtcgcttgggtcagagggccttgggtcacaggcagatgggccctctggagggatggagggaagtttggggacagtggcatggccgatggctgtttggggcgcccaacttctgagacagaaggcgggaagcatttggggccctgggatccagtttggtcaggcctggagagccagctgctctgctggtgaatgtgactgtgagctgagagcaggggctagctctgctggggaaggtggacgtatagtcaggcgatcacagtccagggtggatgagggtgatggcgtgcagcgtggaagaggcagtgacgtttgtacaggcacatcatccatgtatagaagggaggaagaagaacaatgtggggaaaagcatggcaaacgcaggggctggctagctgtggaggacatgggggagtaggggagagaccactcggaggtgcctgcagtcagggctggcatcttgtttgcctgttccttctcagtgcctaggcactgcattgctttagagttggggcaacactattaattgattgattgacagggttttgctctgtcacccaagctagagtgcagtgtcacgatcggagctcactgcagcctcgaacctcctgtgctcaagcaatcctcccaccttggcctcctgagtagctggtaccactgatgcactccaccacacctggctaaattttaaatttgatttgtaaagatggggtctcactgtgttgctcaggctggtctggaactcctggcatcaagtgatcctcctgtcttggcctcccaaagtgctgggattacaggagcgagccactgtgcccggccaccacgtttttatttgttacaggggtgtatgaggcacactccttccttaatccctgggaggataggcagcaggcttttggtgttctgtgggtttttgacacgttttctccttcttacaccctctgcttcctgctaggttctgcctcagccagctcatcattcagccctggtccaggcctgcagggttgaggggctgtggccctgaggcttgcttggtggccttctggcttgttgctgttcttactgatgttgaccactagatggcagcaggaaacctatcaatttctcccccaggtccatcgtattcaagtcaagccctttggtctgggtggatcagccatcgccccttgatggcatggggactcaaattccacatctcactgattccaggatgggtctgaggaaaggctgggatgaagccgaggcagccctctcagacgtaccctgtgtccaactctcctgtgacattcttgagaagcggctgtctcagctcaggtagtcccagggttgggagatacccttttagtagagttcccaccattgggaaaatctttgccacgtgtgctggctgggttttcagtgtcttaaagggtccagaagccgagacccagtgtccccgaggaaagtcctgttgctccccgaggagtccccagcttggtagcctgtgcagttactgagggcactgtggtggtgggacacagtgctcctggcctgggagggacaacagcgtaagagcaagggcatgctgcacatcagcagtgacgtgcagtgacagcaaacatgtaggaagcacttcgtgagccagggatgccctgactcctttgcttacatttattggtttcctcctctttgaggggcagccctgaatccctcctaatcaggtgcagctgagcggggccttgaatgcaggcaggctggctccagagtcccgggataagtcacgcaccactcatcgtgggcattcttaagcctttgcgtggggctcgacagtttgtgttacagttcacgtggctcttcctcaaatgccttgtctcattgatctcccccacagcccctgtgtcaggtactgggggatcctcttttttgcagatgaggaaattgaggctcagagaagtgaaggatgcctccagcattgcaaagacaggacaccaaaccctgtcattagattctgagtcggggtggctctccttttgtcgtgaagcgggtttgcatgagtagggttggaaggagggagaggagccctcagatgcctgaggtcagggcaactgtcagaaaatctattctgttcccaaaccctctgtaagaggaacacatgttcaggtgcccgtgggaagctgaagctcctgcccagccagtaagtaaacaggagctggagggagagagtgtgcgagaatgaggaggtggtgaccgcagccatccgctcccgccatagtgtacccctcagctggaggcaggggtggggggcacattggctggggacccctctaaggcagggctggagaaacagcccccactgtgcactgtggagccgccaggtggtcccagctgccagaacccctgccccgtccagtcctgctgtgaaggcttcgggtgtggaagggcattgtgtgcttgtggtgggatctgaatcccagttggcctgtggagctaccactgctactctgggatcaactgaggcaggggactgcggccgggaccctctttccaattggaccttctcaggggcaggaccttccaaactaaggggcagcagtggatggctcctgggctccttgtcgtctcctctctgggatgggtgttcttgaggccttgggcttccgcccccatcccaccctctctggggtgtggacacagggcccacttgggcatgtcagcttccctggagctcccgcagctgggccctgcccacgtttccccgggccacgctctcctggctgccccaggcctcaccactctctcactggaacacataagtgcctgcccctggagcccaggccactgtcctgactcctcgcccttcccagagccccgcctcctgctgcctgcctcccatgtggcttcacatcctgcgggtttttccagctgacacagcccttgtagatacatactctgctctgggcaccccacatccatgccaggcccagatttgggccccaagggagtgctaccccctgggttgcagttcaaaggcttctgctttccagccagatggaggagggctctatcccaggctccaacatcctgcttggctcatctcccccaccccctgctccagctgcgtcctccctgttgtgctcctggcagtaggtttgctgagagggaagggggattcctttcctcttggcctctcctctctctgttacatcagcctacagcccagtacccctgggctctgccaagggagggctttttctttttttctaggggaaataattccacctcttgtcacacggatttctgcatgcagctcttcaggggcttgacttccttccctcgtcctatcccaggccccttgaagctcaagagaggggcagctttgtttccttaaacaggggctgctgctggctttgagcctccgaggaaggtcgtgtgaggagtcgggtgtctgggtcccgctgtccccctcactggctgtgtgaccccaggaccatccttgccttctctgggcctcagcactcccttcaggagcctaggactgcatttgtcgtccatgggtggtgagggggcagtgcccagcggtgcccgttctggaatggagggctctgcccgtgggtttggtagtgtgatttttccacccctgggctggcccctctgcctggggcgggtgtagctggcacacctgttaggaatgaggcatctccttagtgccagggagacgagagccctggggctggctgggaagtgcagggcccagctgagaaggagagcgagctcagtctcctcactgcgggtcattcaccacctcccggagtcggttagaggagggggctagtccagggtgaattggtgggatgggaagaggccccagtgcccagctctgcccagtcctgtctcctcgctgggctctctcctcccgtttctttttttcttttttttgagacagggcctcgtgctgtcacccaggcaggagtgcagtggggtagtcatgtgcagccttcacctcctgggctcaagtgatcctccctcctcagactcccaagtatttggtgtctgggactataggcacgtgccaccatatccgccatacaaaaaaaaaaaaaggacttttttttcctttttttgtatttttgtagagatggggtttcgtcatgttggccaggcttgtcccaaagtcgtgggctcaagtgattcgcccaccttagcctcccaaagtgagccatcgcatccgggctaccctgtttcttctttgttttgccccatctacctccttccctttgcttggctttctttccctgcacttatctgactgctggccgaaggttccaagccctgtgggcagggtgggtcctggaccctgttctccgcccctcagcccgtgctctgttcttctccaggcaggcggaaagctgtaccctgcttcccagctcagagcccagggctacaggctgtggacgccctgaggagggtttctctgggcctgctcccccaccctccctacacgctgtgccccagcccctccccagaacccacatctggcccaagtgctcagttttctgggctgtaaattgcctcccgctgccccttggcatcctctcaggtttcagcttcatggctgttttgcttttggtggggggcggtgtccagggaaggctcaacttgtttcctctcttcctctgtctgagaccatggagagaaatccttggcagggttgttctcgatccttccgtccaagtgttggtgagctgtggttttcagcaggtggctgagtaggaaccagttctaattagatttcccccttttctgttcacacctccccctccccctcctcccctcaccctgccagtggccagccttccccaagtgtcccctgccgtgcagtggaggggcttgcagtcggccagcctggggatggtgggattcgcttcaggctgcgctgccctctgctccttcttgacctggcccttggcctaatgctcagcctcaagggtcccctcaactccctgcatcccctcagataacttttcctttttttcttttttttgagacagggtcttgctctgtcacccaggctggggtgcagtggtgtgactcccaggctcaagtcgttctcccacctcagcctcccgagtagctgggaccacaggtgtgagccactatgcccagctcatttttttgtatttttggtagagatagggtttcaccatgctgcccaggctggtctcaaactcctgagctcaggtgatccacctccctcggcctcccctagtgttaggattacaggcaggagccaccgtgcctggcctcagatagcttttatgttccttcacagcaggtgactctctagcccctgcagctgaccgtcaggggctcaggccgttgcacccacgtggcctccccaggagcatggcaaccatcagctccagctggtccctgggcagatccactctccccgctgcagaatttgctttgcactatcgccttagctcatccacacacctggggaagcctgcttgcttaggcctaggaagggtatctcagggcagccaccaggacagtcgggtgcaagtaatcatcagattactacccagagtgtggcccgtggacctgggctatctgtaaggaattaagtcctggagtggaaagcgtgcatttagtaatgctgtagcggttgacctggccctgacattttatgttgtttagtgtttcccaggggtagctccaggggagtctcggaatttggtggttggtaccaaggaaacttgtagggatttttagtcgacactgaaggacttctctcatcgaacaagatacgggccagtttgggtgttgttgaaatctggaggagagtcatgtgtggtgcgaaacaggtcacagtaggatcatgcactggcccgggatggacgggaaatagaaagcctggcactggccacggatcagctgagaagtgctgccctctgcatcccaggcctgcagaggagtccctgcagggaagttcagagggtttcttaggagcagctgaagggatttttagatttggtatggggtggtgaggaggcgtttggggttcgatgatgaatgcccaaggaaagttcaggatttcttgggggaattggaatgaggaagatttgtagtttggtgtgggaagtcaaagggtagtttggagtttgaggtaggaggactcagggatgtttggggtgtgggggcccacagggaaggctcagggagggcacagaatgctgtgaggttcctgggaaagcccaggggaagagtgggttcaggagtgtggaccaggggaggtttggaggtgacagtgggaggctgaggagagatttggggttttacttgccaggtggaagggcgtttggatgtgtctagattaaggaccaagggtgttttgggttattggagaaggctgaagggaaggctgggtggggaagggctgtgggaagtgttggggttcatagtaggggagggagggggaatttttgggttccatgcatggggccagaggggagccgtgagattcagttgacgaggaccacggggctttgaggtcctcgccaaaggagaggtttgagttttgcctttcccagggttagctcagcttccacagtctctgtcggctctcaaataccccgtgtcaggaggaagtctaaaggaatcttaacctgtccccttcagacctgctccttggtgccagaaccttcttcctccctcagcttccccaactctctccacacaaaggcagctgtggcatgctgtgagagcacacagggatcttaactcagggtgacacccagtggcttttccagcctgttcgcctcggtctcccagcctggtggtgatggctatccggccggcctctgcagcgcacggtgatgccctggtctctgccagctcaccttcctcctgccccgggccctgctcctctgaggcccacacatctttctagggccagcaggagtcctgtgtctttgaggaggccgtgcgtgaccccgtcacccagtggcctgtccctcattccgtgccctcatttgcccttggctgtgtctcggctgcagctgcgcttgtgttttgccctgactcctcggtgtgcacgtgtctctccaagtcctagatggtggcaccccagaggctgggctgcgcggcctctgtgttgtatcttagctgctggggaaatgcaaggccgctggtctaaaggcttttctctgagttggggccacccatgcttagtccccacccaccaagcctggcccagacctgttctgtgggctgctcttgcttttcccctttgcaggaatagccccacatcagaacaagtcacctcctcccagtggcagccacctcagacttggatgcaaggaccccatcccaagttgtccctataagtttctcctgtgcccggaagccgacttcctctgtctggcgctttcccatgtggccagcaggtgcatagcaaggcttggtgtcaggcattgcgctaagtgtcttaccatggccaggtgctcacaggaatcctgtgtgacaggtgccttctatggaggaggagaccaaggcacagagaggttaaggaagctgcccagtgtcacacagactgagattgtcaccgctctgcctgactgctgctggggtgacgctgctgggcccagatgccctccagggagcccgctgcctgctgtcctccctcactgcagcctttattttaccatggagtgtccccacccagccacaccactgggcttcccacttggcaactgagtttcccctttttctctgtctggggacccctcctcctttccttggaaactgaatggggctcacgttggcccctctgtgtgggccccctcctcgcctctcgcctcctcccttccctgagaagggctgaaaccattcccaggctggccctagatgtgggacaagggctgtgggatgaaaggtgatatataaatgtaaggcgatgattatttatttgacagggacagctgcctgtggtaaaaaatctaatctagtaatccttttgtgaaaatccgatccgaggctcagcaagccgcctgagacagcaaaaggccacgttccctccctgctcgcccctgccccctgcgccatgctcttactcctggtgccccgcatccctgcccccgggtgcctgcggtgcgtatctccctgtgtgcgtgctgcacctgtgcatatgtgctcttgcttttgcttttttgggttgttgttaacatcctacataatcataggacaactgtcaaaaccaagaagttaacattggaatagcgttattaacaatagattttatttagatttcactgttcccacgagcgccctttttctgtaccaggagcctccattgcgttgagttgtcctgtctccttaggctcctccgtcctgcgacagttccttagtttctccagatctttcatgaccttgacagtggtgaggagtgctgctcggtcactctgcaggacggtttttcactctggctctgtctggcattttctcatggttagactgaggttctttgtctttggagagaccactgtggcatggtgacgtgtccttctaggtgtgtggcatcaaggggaatgtgatgtctgtgtgtcttattactggtgatgatgccctgctcacttggagaaggtgatgtctgccaggtatctcccgtatataaagtggcccctttttctttataattaataatatttatagttatattaatcataattaataatatttataattatattaattataattaatacaccattaatgtcttgagggcaggcactttgaaactgtcctggttttttctcaaacctttgctcactaattttagcatccatcaggggtttttgcttgcagctcttataattgtggtgtttgcctaatggtaattttctgtttccctcatttcttctgcatttattaattggaattctccaagaaggaagagctatttcttctgtcccacttatttattcaattagttatttttatcattacagactcatggatatttatttacttcacagataaaaagtataaatgtatggatataggatatataataaatatcaggatatatattttatcctataggttagagttacaggaacagcacaatagatatttattttgttgttcaacttgctgcagccttggccatgggaagctctagggagcactttcagatgggcttctgtgccctttggtgtattcctgtcttttctggagctcttccttactttctggcacaagatgctccgggtcgtgttatgtttctcctgccccaggcctgaatcaatcacttctctaaggagctctgcttctttttgctggagcatggtgtttagaaaccaagatctaggtgctaggtgcgttcattgctactggggtgtcattgcttctaggtcctctcagagaatagaactaagaaatagatatatgtcaacccaggcatggacacatatctgtatctctgttgttctgtttatttgtgtttatatttacaaaatcacgagtgtgtgctgatatatttatttatttatttattttttatttattttactcttttgagacagtcttgctgtcacccaggctggagtgcagtggtgcgatcttggctcagtgcaacctccacctgctaggttcaggtgattcttctgcctcagccaccctagtagctgggattacaggcacctgccaccacgcccggctaatttttgtatttttagtagtgacagggtttcaccatgttggccaggctggtcttgaactcttgacctcaagtgatctgtctaccttggcctcccaaagtgctggggttacaggtgtgagccactgtgcctggccagtgagtggtatccctataagagggacacaggaagcaccatgtgatgacagagacggaggcacaggttggagcaatgttcctgccaaggattcccagcaatgaccagaagctagaaagaggccaggaaggatcttcccctagaggctgcagagggagcctctgccaatgcctccattctgcacttccagcccccagaaccgcgagaccgtaaatccctactgttgaagcctcccagctcggggtactttgctgcagtggctccgggaatcacatggagtggtttctagtgggggttgcaggtgcgggcagcttctgtcaggctcctgcctgagatcatcctctctcacatctgggtagccctgggctgcgccctgagaagtgaacacagaggctagtgctagcatgtcagccatggccaggtgccccttcagtgaggcttgtgtttgggcaaaattagaacccaaaaagcttgcatttaaaccatagctgctgatgatatttgtcccttttccctattcccccagacctttatgttacgaggataatctgatcatcaaattgtgtttcttagcatttaattggacttcaaatcagttgcattgctttgtttccttgtgcagagagctcaagggcacctcctaggaaatgtccctccttgatttcacacatcaaggtcattcctagggctcctttttcttccccccactcccttgtgagcacacagtgcgtgcagcagccctcggcgtcctctggtggatgacgcgtttgtcaactgcttggaccgtgaggccctccggtcaggaccgcgactgcccttgcattcacctctagactcttgagcacgtgcacagctctcagtgccagctcaaggctctctcccgttgtgtcctccctgactgccagtccatggtgctcttgttcttccttggcagtgctcttgtttgggaaatgacctttttgtgtgaacttgttttgacgtgccagcttgatgaagagctcctccagggccagggtcctcccgtccctaggaggtgttcagctagggtttgctgtggatttcctcctttttgatacccgtgggcagaggagcacccacctcagtacatcttgctgagtttggggcagaagactcaagtgcatatggggaaactgagtcccaggtgaagagaaactcactcgtcaccctgaattctaatagcacatacacagtgagggcagaagaacagggaccaggtgtccagagcttcccagcagtcctctctgccaggatcatcctgtcctgctcattcctcatttttctgtccagatggctgggggaaggcgtggctggcatccgccaaggtgatgcatgaacacatggggttcagagcagagagggctcagaccatttggggtgtcaggctgggaaatcggaaatgaaaggcctggcgtggtggccagcaaaacctcctcctggtgcagtgttccgaaatcacctgtggtgggtttcattagcatgggcacaggggagggaaggcctcttggcaggcagaagagacagatgggctgcaggcactggcttggccttgcgagcgagccacggggcacgcggggcctggcggtggccttccaccacgaggctcccgcaggcacaggcacgaggacgctttcccactttgaggctgtgagctcccccggcaagcccactcccctcctggacctcagtcttgtcatctgtaaaatgagaagattgggccaggcgatctttgaggtctctctggccctgacagcctagatttatgacccgtggccatcaggggagtggtgactaggtttgtggtcaatggcaaaggggcaggagggcgctgggatgcgaggtcaggggatggagcccgttggaggaggacagcttcccctgggtgtctcaaggccctcggggagcttagggtggggagactgtgtggagatggtggtctctgaaaagagggcttttcttcctccatagtcccctgacagtttggttttcattctgcccacctgtctgtctaccctccgtctctcctaccagtatctgtggagcacctcctgtgcagggaacacagctgtgcacgagacagacaaggtccttgctttcatggaatccaagatccgattgatgaagacaggcattagacaaacagttcacaaatagttaattacacttggaataagtttaaatgcctctgtgcgctctgctcttcctccttgatcttacttttctgctgcctccactctcctcctctttcctgcctccttatctttctccacctgctttgtgtctatggcctttctccacccacccagtgctgagatcttcctgggattctgtgctctctaggccagcaatgcaaaaagctatagatcttgacctttctgcttgtgcgtctggacattctctgggaggagaatggtggtggatcccgtggcctcctgaaaggggtgtgggtagattgtaagctttggggccatgcttttttgggtttgcattcagattgtgacacttacaagcttgcacaagtcccttatcttctctgagcctcagtttcctcatcggaaaatgggtttaaccacactcacctttcagtagtattttggacatcaaatgggtagatgtaagtgaaagttcattgttggtaccttgattttaaggtgtttgattaaaactagcattctctccccttttctccttacttcctttctgcagggtatgtagtgagatatttttgagtttagggtggagactggaagcaggggagccctggccctctgcaggtcacgctccagcctggaacccaggtgaggtatggaggagctgctgggcagcaggaggcagggaccacggtccctgccctgggatgaggagcccgccaggggctggagagaatgacaggcgtcccatgtatcccaaaaatgcagtgtggtgtgacagctgcctgctgcatcctgctgagtgttggggcccgggagaccctcgccgaggagcaaggttggtggtgggcatgctgcagcctgagtcctggtggcatctccaccgacgcgacgggaagtggcctctccctccttcaggatcgcccccaccttccctgcccacttccagattcagtttgagccacctagggcctgttctgcccccgaagagagagaaccagccagcccagtgctgcaacgatggaagtgttctgttctgtaccgcccagtacagtagccaccggctacatgtggccgttgagcattgaaaatgggactgaaaatgccccaaggagctggattttaaattttattcagttttaacttaaaatggaaatgtaggtggccacatgttgctagtggctgccacgtcggacggtactgttctagaccagtagttttcacctgcagtgttggctcacactggtgggtgccctttggtgagaggtgcgttgtgagtgccttgttcttagtaagagattactaagctgtgtgagtggtgtacacatatgtggagtcgggtgggtcggggggcacagcttggcagataaaggatgggctcctgcaagtctaatctgggtacatttggagattgagtggagggtctggataggggagaaggaggagagaagtctcaagcacttcattcatcctggagacaaagcgcaaaactagggaaggaattttgagcagtgattcctttgaaagaaagggaggaagggcatacatcccagggccattggctaaagcactgtatggattctataggggctggaggagacctgaggcactagtgtgtagcctgctcattttacagataaggaaactgaggcccatcatacattggaccagaatctgagaactaccctgtaaagtaaattatctgcctcattttgcagcagataattgcagagaaactggaaatcaaagccattgggcattttagtggaaccaagttttggtcccaagtcagtccagagtcacaagctgaatttctcagactctcaggccaacacccacactgccagctcatggcatcctttccagcagctcgggctgggttcaggatgctggggttcctccttcagcacctgcggcctgtgaggtggccagcggtggggctgtggctggcagggtatggaacgtgggcagggagcgtggccgtggttgtgtggggctgtctgctccagggcctagagcgtgcacatgaccacactgccaagtggccctgctctttgtggaatccagagacgactgcctgaaagggaccaggagggacaagggagcaaggtcagagtggagccgaatgctcatattccactccttacagagcagcactcagaggagacctgagtctctgcatcctctccagctcggctgggaagctgcccaggcgggggagggactgccccatccagctgttgtccacctcccagcctccccacggctgcagctgtcccagctccatcagtcacgtccaaggctgggtgggaggaggggatgaggagaagagggggcctctcgggcgtgcctggccgaggtaactttggctcctgcctctaaggaggtctccagttgctgagggaagaggggagggtggtggctgcctcctggatcctgggtaaattgtggggtgtgggtagctcagctttcagccccccgccatttgtctctctgggagggccagtgttttattgaaaagaatagaaatggtcgaattcttccttcatctacatctaacaagttcttttggcacttcttagctttgctgtagtttttgtgaatgaataaatgaagggctcctcacctgcctccagggtagggagatggggtctttgtttcttccggcttactggtttgatgatggtcaggccctgtgtgtaggggctggacttggggagtgtgagctgtaaggatgggtgtattttgtcctccaagtgtggcaggaaggagggagatgcccatcctggcattaccattttctgcagccagatacatgccttgccttcttctctcttttttacctgaaattcagcagagtccttgaagtctctaacaaccttgcattcttcagaagctaaagagagatgcaaagagagaagtggtcctctttcttggccagacctcagtttgccagcctgaagaatggagaagcattgccacctgtctcagtccaacagacaacagcatcatggtgtaaagagttgatttgagccctttggaaaaaaggccctaggggagaggcacttattttgtttttattctgagctttatctgatctcaacacaggacaggatgggtgttagccaagtaatagccaccagtgattcaagacctggcttggagttagagacatctggggagcttttcaataattcaggctcctgggcccccatcccagatcttctgagtctgaagctctgggaacgggggcagaaagctgtatttcgaaaagcttcccacatgattttgatgcaaaggtaggtttgcccctttgaggagaaatcccttgctgaacagatattcgtaagtgcttttctctgaagtatgcctgactttgggagcatttgttaattgatgtattcatccagccagcagacatgtagtgaacgcccatggcgtgccagacacagctctgggcagaggggtgtgggcaggattaggtggagtgttcttccctcagggagggcacagtccagtttgggagacagacagcaccagcagtgacaatgtagcatgaaaggtgaggtgtgggagatgcccgctgggcccgttacatttggctggacttcagagaatatgtctcggcctccctcggtctgtttccgcccctctgccagttataggcttaataccctttttatgtgtatttgaacagaatagggcacatagctgacttgatgctgatgcccagagagattagggggcttgactaaggccgcacagtgagttagtattttgttgatggggggcaggaatggggagggtttcctttgaaaaatctgtgtcataaaacccctaaatggattgtagtatatatgggctctgcaggtggcaggcagacatggtgtcagtcttggtttcagtctgtggcccggtgtgaatctttggtttcttgtctacatgctgaggctgatatatacgcacgttgctgctggttcttagaattagagatatggtatggttggcccatgctaggtgctcaatgaatgccagcttttcttctctgccgttgtatttggtgtcttaagtgaggagagtatgctttttggggcctcagactctctgagccctccttctagctgggggttgccttagctaattcccacttacgagctgatttcagggtgctgagttccaggccctgcaggagatcgaatgctgccccttcttcaccccacgcctggcctggccttggggagccctcccctgtcctgtgccttttaactcaatactccctgacagccccatgcaaattgctagagcactcagaacgcctcatttctcataaggccccttcatccaagcctttgtccttccgctcaacgttaaactctgtcaacattttttcccaatgaagttcttcctccctctgcagcgtccccagcctccagccagcttcgctagccagggacacaattggattgcaatttctagcacttcctggagatcaggtccctgaagagctataaaaatccagcggtgtttctggccacctttccatgtggtttgtagtgcactgtcagtcacacacgcctgcagagcatgtgtgtgtttgtgtttgcacacgtgtgtgcatgtgtgtgagtgggtgcatgcatgcatgtgtatttggctttaagggaggctctcatattgcattacctatgttgctagtttctggctgccagtttgcatttcttaggcggattttctgattccaggctcgggagggctcccctgcactgtatgtaattgggcacgaagcccgtggtggggtggatttgggtaatggcagggctgcattcctcccattcttttctcacaggaaaaagtgcctggatataaccctgtggtggggattgcttacaggaggggccggctgcctgccaccagccttcacatttggcccctgtcggccccctccagccttgccctcccacctcccctcaaggcagatgccaccagctgggtgggcactggggctgcgcatgccccctcagtgattaatggcctgcaagacttggctgcctcttcccgcccatgcttggtgggacatggcgcccatttccagggtcttcttccttaaacccagatatgaaacagaatagggcagcctccaacgtgaaatgtctcttactctctcccttccttgctccctccagccttttttcctttcttaaaaacaaaacaaaacaaccgtggtgtgcgcctgtactcccagctactcgggaggctgaggcaggagagtcgcttgaacccgtgaggcggaggttgcagtgagccgagatcgtgctattacactccagcctgggcgacagagtgagactccacctcaaaaaaaacaaaaaaaacacacagccgatctttggaattgaaaagtaaaagcccaacaatcaggcgtaagtaaatttcctgcaaatgggatgcctgctggagggggctgtgatttgctgcttggcgcagacaactctgaggaatttttcctctccagctctcattcccttggggaattcatggcggggaatctctccctggggagtctgaccagcttggaaggaggtaaggcaaggagggcttcctgttttccaaggcacccccctctgtcatagctcatagggaagcagctgccacttcccagccctccttgcctggccaccagggaggctgctgcggggtcagccctcctgattgtcagcaggatcctggcacccagctcctccctcacctgccacagggtttggcctgatgccagggtgggctgggatttggcatcccaccggcccctctttttggaaggtcctgtggcagtccttctgtccttctgacacacctgcccccacttggcaagcagccttcccctgagatctagttcctgagtgtccccagcgatggacacagtgaaacatgtattgaaaagaatgagggaaggacagtcttgggggagaatgctggactggctgtttctagcctagaggctgtcgtcagagccccgttcttttcttttctttcttttttgagacggagtctcgctctgttgcccaggctggtgtgcagtggcgcgatcttggctcactgcaacctccgcctcccaggttcaagcaattctccctgcccccgcctctcaagtagctgggactacaaatgcctaccactatgcccggctaatttttacatttttaaatagagatggggtttcaccatgttggccaggctggtcttgaactcctgacctcaggtgatccacccgccttggcctcccaaagtgctgagattacaggtgtgagccaccacgcccagctgagcccccttcttttcttatgctgcatcagaagacagggactctgaaaccacagcagaaatgacagagcagcagaggcgcacacacacctgacgggtgggggccccaggacggcatctgtgctcagtgcgaacgctgagcttccttttatggtgcgtgcacgcctgcgcgtgtgtggggtgtggtggtggtggtggtggtgcagggcaggccttccttgaagccctcttcagactgatttgtgacaccttttccttgtgccttacccctgtggcagtcccggaagggcctgaacaaagcagacatttcctgcctagcccttatcatcatgtgctagtttatttcagggtcaggagctattgggcattttaaaaaaatacttatcatataagtaatgccgtataataggaacacaaatcaaagaaataggggtataaaatacctgacaaacctgccatcatgacaaatcagttttttattttccatgatgccttcagtctgtatttgcttgcaaacataatttttttttacatggttatagtcaataatgtagatagaattttgtgttctatttgctttctttaacattttaagaattttgcattctatttgctttctttaacattttactataagctacataatcatcacaattatgatcatcatcatcacactttcaagtggttacataggaaatgtttcctatttatccgttttcctactgttgaatgtttagctcacaattttaacttacctaaatagtagaaactgcactaatacattaatatgttaatattatatatatgtgtgtgcgtgtgtgtctgtggatgtatctctgtctgtttctctgtctagctgtctgtttcgctttcctactgttgaatgtgcagctcacaattttaacttacctaaatagtagaaactgcattactacattaatatgttagtattatatatatatgtgtgtgtgtgtgtgcgtgtgtgtctgtggatgtatctctgtctgtttctctgtctagctgtctgttcccctttcctactgttgaatgtgcagctcacaattttaacttacctaaatagtagaaactgcactaatacattaatatattagtattatatatatatgtgtgtgtgtgtgtgtgtgtgtgtgtgtgtctgtggatgtatctctatctgtttctctgtctagctgtctgctcccccttttgcgttatttccttaggacaattcaagaagccaagcattctttcctagagcaatgaggtatctcattctgggttattaaataccagccggaagtcaggtgcctgagagcagccacagggtttagctgagatcttggcccaagtctgttttcacacactgcccttgggaaggcagtcaggtagcagaggtcctgctttaaaggctgttcactctgcatttttatcctatctccagcttcgaagcccgctggcctggtacatagattttgcgtatgttgcttcactcattcaataattcctaagtgcactccccatctgaccccattcaaagcaagagaaataggtctcgctcgcacccttagggaacttgcagtctgaaatgaccgtgggctcacccattcaattatattcaatcaactttatgcaagcctgcaaactcagatgagcgataacagcccagggttgtgggcccatcagcgtgttcctcccttcctccctctcttccttccctcccttttcctcagcgtcctgctttcattgttttgcagcaggttgaccagcatagaacatgatgcacatgttcagccgtgcaaaagaggagctagtgcttaagtacaaatgggagacatgattcttttgttttaagtaaatacttagcctgacttcggtcctgtgagcatctgcactccaggcctgagcagctgagctgcctctcacatggacctgccatgattccatgactgcctgcatgcccagtcatcactacatggcattagggtgccagtggttgaacgtgatcacagtgagccccttttctagcgacttctccagccccctacagacatgatctagctaggacagagacaactggaatttctcaaagggcagtggtctgtaacagttaagcattctacatggttctcttggttccctagatcttccatttttcaaggaaaatttgaacttctgatttttgggtaaaatctcctaatttttaactattggcagctaattaaaaaaaaattaaaacgtgatgcggaccaaataaaacctgtgcgtgggctggatttggtctgggggtaccagcttgtgacccctgctttatgtattaaaggtagggtgttatgctgggcactttggggaatataaagagcataaagtgatgaaattaataaaaatcatggggtgtgggagaggcagctcacacacagagcataacacagttggctacgcaagtgaaaccgaaggcgggctgttccgggaatgctgggcagagactgttgatcgtgttctgagcttttaggaaatcagcacgaggaggcctctcctgaatagctgttagaagagaccatatcttccaggcctggtgtggtggtgcgcacctgtaatgccagcattttgagaggccgaggcgggaggatcccttgaacccaagaatttgaggctgcagtgaaccatgattatgccactgtggccctgatgacagagcaagaccctgtctctttaaaaaaaaaaaaataaagagggagcgagagcaagaccacgtcttccttttctagtccctttgggaggagttaggccttgagtgagagacggcttgaagcatggagttggaactgggaagactggattaggtgggtgccgagtaaatttccttttctccgttttcccatcacgcagtgaggaaaattgtcccccttgggcagttagcaagtatttattgtaggcacactggaggcggagttgccagggccccctcttcctcccctccgagatctctagggggagataaaggggagtctgtctgaagtgctttgaactcttcaggacgccgaaaggacttgaagacgttgctccatggttttcccggatgacagccatgacgtatgagcctagtgatacttaagagatacgacttgctagggaagtaaacacccagtgttatttattagttctttaaaaaacaaagcttttcttagctgggaggtttcagatcagtgacaatgtcagctccagttttcctctgttaataacaggccagcctcctccccagcctgtgtcagcggcattgagaagtgtgtctggggtctgggtgcacctttggcatttgatgattccctgagaggaagggaaaatggtactgaagacccggaaggttgtgcagggccaggacggatctcgttgtgaataataaagcaagctgccttccagtgctgggccttttgcttttatctgtgtcctccctccatgtagccccctccaggactgggagagggaggggcagcaggtggggagtcggggggccaggagatagggtgctgatagaggcatctcctgtcttcttgataggggaggtgttggagtttgggatctaggcaagacttggactttgcttcttagagttgtttttttgtttttgttttttttttagatggagtctcactctgtcacccaggctggagtgcagtggcatgatctcggctcactgcaacctccccctcccagattcaaacctcccagatcctcctgcctcagcctcccgagcggctgggattacaggcatgcgccaccacaactggctaatttttgtatttttagtagagatggggtttcaccatgttggctaggctggtcacgagctgctgacctcaagtgatctgccctcctcagcctcccaaagtgctgggattataggcctgagccaccactcccggcctgcttagagttgaatggaatctggagatgaatgggagggttagctggctagctgggaaggctgtggagcaggagaagggcccagggcagggggcaagggctgagagctaaggttgaggtgaggtctgatgaacttgagggccactgcattttgaccttgagtaactatagtattgataaggacagtacctttgcagtattgagtacaaattctcccccgctgagcctcatagaaacaggccagagagggcagagcaggttttattatttccacttaattcaggctgaatgtggtgtttttttttttttttgagacggagtctcgctctgtcacccaggctggagtgccgtggcgcgatctcagctcactgcaagctccgcctcctgggttcacgccattctccttcctcagcctcccgagtagctgggactacgggtgcccgccaccatgcccggctaatttgttttgtatttttagtagagacggggtttcaccgtgttagccagggtggtctcaatctcctgaccgcatgatccccccacctcggcctcccaaagtgctaggattacaggcgtgagccactgcacccagcctgaatgtggtgtattttaagaatgtgggtttttgaagctagacacatgtgggttcaagcttagccctctgaccttgacgaacctcattagcctctgaatctcagtttctccatctgtaaaatggggagaccaatgcttgcctcactgggtattttgtaagggatgaaaacctaaaatagtctttggcatatagtagacattgaatagtgaatagcagctgctactgctgtcagtgtaaactaagaaacagacctacagaggtcatctgtcctgctggaggtcacaagggaaacagccaggactggaaccacggtcccagaccttgtaggccgtgttcttccattcccgggacacttctttccccttccctgatcaggtgggcgctgggcagacgctggcaggcaggcaccaccgctgtccaggacgcatttatgcctgaattgtaagttgtgggctgtgcctggcctcagacatgattatagggtgctgacaaaaacagcaccccctgattaagacgatgagcgaaaacgcacccgggcttttgttcactgagcaactccattgtgtctttctccccttttccacccctccctttatctactaaaaaaaaagaaatggaaaagatgaaggactgtcagcaccagatcacaacacgggctccaggagttggcggcttttcagtgcctgcggggtttcctcttcttgctttcctcgaccaagtctaattgagataaatctgagggctcccctcggagcacagggcttcctgcttccctgtgtcccggaggagcatcccctggggcttgctttgtcagcactctcccctgccccatggatgcctcctacaagatctgtggaagtggctgttcagtctgtctgctgcctgtggatggagctacctttccccagcaccccacaggtcatgtcacactcccttttcctatctcagatctgtgcttccatgtatagtgtgcaaggctctgcagaacttgacctcagcttgtctttgtgctgccgtcctccactgttccttgcataaagcataggcttccgtggctcacgcctataatcccagcactttgggaagctgaggcaggtggatcacgaggtcaggagttcgagaccagcctggccagcatggtgaaatcccatctctactaaaaatacaaaaagtagctgggcatggtggcgcacgcctgtagtcccagctacttgggaggctgaagcaggagaattgcttgaacctgggaggcagaggttgcagtgagccgagatcgtaccattgcactccagcccaggtgacagagcaagactctgtctcaaaaaaaaaaaaaaaaaaaaaagcataggcttccactgtgtcggccaacttgctacttcctgacaggtctggaagccacctgcctttgtgcttttgatcacttagcctcttttgcttggacagccctcaccccagtggaattaggcacagtcttcgcggattagctggagtgccagctcctttgtaaagtgcgtcttgcttgggaacgtactcctcctttgcccggcacgtcacagatatgaaattaatgttggctttgcttagggccctctgctgtgactgtgcaggtctcttccagggcctcctcagagcttgattgtctgcgctccccaccccctgccagggagcctatttacacttttattgtacatgatctaagttcttaggcatttttctttctaagtttaaagttctcttacttttcccattattgtctgttgtttctgagcctcggaggctacggcaacaggagggtgaagtagaaagcacactagattgagagcaggagccgtggcttctcctcccagctctgcctctcaccagctgtgatttggggcaagcagctgaccttgtctgggtccgtctcagttccccatctgtaatacaaggggtgggctggctaatttctaggatttgtggatggggttttaaagaacagttttcctgagatataatttgtacaccatcacactctcccattgttacaggctcaattttgcccctgcaaatcctaaccccatacctcagaatgtgactgtatttggagggagagaagatctttaaagaggtgactgaggttaaatgaggtcaccagggcaggccctaatccaccatgactggtgccgttataagaggatattaggggcctggcaccatggctcacacctagaatcccagcactttgggatgccgaggcaggaagaccacttgagtccaggagtttaagaccagcatgggcatcatggcaagacccctcatctcaattaagaaactgtatatatagagagaggatattaagatagaaacaaacacagagggaagacaacgtgaagacgtagggagaagacggctatctacaagccaagaacagagaaaatggaagaaaccaatccagctgacaccttgatcttggactcagcctccagaatcatgagaaaataaacttctgttgtttaagccacccagcctgtggtactttggttatggcagtcctagcaaactgatacacctatttgtatatttaatatacaactcaatggtttaatctgttcaagttgtataaccactgccacaatttatattttgaacatgttatcacctcagaaagaaaccccatacccactggaagccattctctatatcctcccaaccctcattcctcccccagccctgggcaaccactaatctgtgttctgtctgtggtgttgcttatattgtggatgcttattttaaatggaatcatgtaatacgggttttgatttttttgtgattggcttcttagcatacttagcataaggttttcagggttcatccatgttgtagcatatgccagtacttcattccttttgattacgcaataatatttcattccatgggtatgctacgttttgtttatccattcatcacttgatggatatttgggttgtttcagttttttggctattttgaataatgctgcaatgaacatttgtatatagatttttgtgtggacatgttatttatttcaggtatctaggagtgaaattgttggatcatatagtaactctatgtttaactttttgaggaaccaccgaactggtttccaaagtggctataccattttacattcccaccagtaatgtattccaattgggaattagactcttttccaatttctccacatccttgtccacacttgttaatttctgtctttttggagccatcctagtgagtgtgaaatggtatctcattgtggttttcatttgcatttccctagtgatgaatgatgttgagcatctgttcttatacttatttgccacttgtgtatcttctattcatatactttgtttattttaaaattgggtatttgtctttttattattcagttgtaagaattctttacatattctggttataagccccttaatcaatatatgatttgcaaatattttctcatattctgtaggtttcactttttttgatggtgttatttgcaacataagagtttttaattttgtggctgggctgcggtggctcacgcctataatcccagcactttgggaggccgaggcaggtggatcatctgagtttggcagttctagatcagcctgaccaacatggagaaaccctgtctctactaaaaatacaaaattagcctggcatggtggtgcatacctgtaatcccagctactcatgaaggctgaggcaggagaatcgcttgaacctgggaggcagaggttgggatgagtcgagattgcaccattgcactccagcctgggcaacaagagtgaaactcggtctcaaaaaaaaaaatagtttttaattttactgaagtccaatttatctaatttttcttttattgtgtttttggtgtcatatctaaggcataattgccaaacccaaggtcacaaagagttacacctatcttgtcttctaagaggtttatagttttaactcttacatttaggttcatgattcattttgagttcctttttgtgtatggtgtgaggtagggggccaactacatttttctcctgtgggtatgcaggtgtcccagcaccatttgttgacataaataggatcttaaaggacacctggagccctttaaaacccaccacctggggagcaggaggtaggtggagcacctagcgtggggcctggcctggggaaagtgctcttggaaaatgccctttcctgctggaagagcaccagtgagcagctccccagcccctgcttctcagccttttgtgttgatattgtacaattctgtgtgtgtgtaacttgctgttcactagacccagaatggtgcttgctatggtttgaatatttgtcctctccaaatcttgggttgaaatctatctatctatctatctatctatctatctatctatctatctgtctgtctgttgttttagagatagggtctcactctgtcacccaggctggagtgcagtgggtgcactccagctcactgcagccttgaatgctggggctcaagccatcttcccgcttcagccttccgaagtgttgggattacaggcatgagccatggtgcctgcctggcctcctcaggttgaaatttgatcccagtgttgggggtgtggcctaatgggaggtgtttgggtcatgaggacggatccctcatgaatagattaatgtcctccctggcgagtgagtacatcctcactgtaatagttcctgtgagagctgattgtttaagagcttggcacctggcacctccccccactgtcttgcttcctctctcaccatgtgatatctgcctatgccgactcgcttctgccttccaccatgagcagaagcagcctgaggcctcagcagatgctcagacatcagaatcgtgagccaaataaaccttttccctgatcaatcatccagcttcaggtattcctttataacaacacaaaacagactaagacagtgctgtatgcagctgcatgctaaataattgattcaggtgatggtgaaggtcagaacaggaggatgtgggcttacatcatagcaggggagtgtccctggctgagagacctgcaggaaccaacagcagagaggttatcaactcttgttctacctggagaggtatttgagggcccctaggtccagctgatggggctcttggaagctgttgatcaagccagggaaaagatgatagtgacagccaagaccagaggtgatgaatgtttagaaaaaaaaaaagtaattttcagctttttggctcctttaatctaaccctgcttttgggccagaagaagaccattttctttcccctcagctctttctcagcagagctaataggtcccccgggtagatttaagggaagttaatgaaacaagttatggttataccaggctctaggctacatgtcgcccttctctcccaggcctccagggctgaggctcaaggtaccatctcccctgccgggagagctgaggcagccctggaggccccaggcagcctattggagagagtgtcaaggtaggggcagcagaacgtcggagggacacgtcttctccttcctcccactgtggacagcatgggaagggagagtcttgccagtcattggcgaatctccccagtagggccccaactctcttctccaagtgtattcccatccccttccatggtccctggctgcggtccacacagagcactcccatgcttgttcgtgcagctctctgtggagtccccagcatctagacactgcctggcatgatcaatagtggttgaatgaatgaatgcttttctaccttgagctcaagctattcatttcacctcattccccgttgctctctggctgttttcagaagcctgccaactgttcaagggccagcttaaatgtcttgtctataagccccataattgaatatgacaatcccatcttttgcttctctcgctcttttgtttctacctctgtttggcactttccacactctaccccatggtaagatatttgtgtgtctgttttaaccccagcattgaaacaccctgtatagggcagggaccatggctttctgttctcattttatgtcatttctcctcccttccaccccgctacacctaggatggtgtttcatagacctttgccactcaacaaagtctgcttaactatagcacctgggtcacacatcgttggtgctgggtctttttcccgggttactgttctgcctacagctttttgccactcagaggattttcctgggtttcacatcctggagtaggaggtatttacgagagacagatgtcagcgtgtggtgttcccaatccattgcgtataatttacatatctctgtgcagctagcatcagtgagaccacactactaaggtattatgcttgactcctggcaggaagaattggagcagataacacatcagtggtaatcccttgctctgccctggaggatacagaaaacctctggtgtgagttactgcctgtggatattagagactcacctgctgtcattaatgtagaggctggatttccctctccaattgattaggcagctctctctgttctctcctctttgcagggaggaggccactccttcaccccagttcctgatctggagggtggggcaggagggccagcaggaggggacccacttagaaggccaagctatagaggtcctttgggatagaccagtggtactgaggctggaccgttcattaggtgcaaagtccctgatgagaggaaagggaaggaaggaaacggtggcctgctctgtatttagatgagctttctctttcctaaggtgctttcgtatgagtttttgctttctattatcaaaacagtcctgggaggtggtttatctctgttttcagacatagggtctacaaagcagaaaagaaggtgatgcacagcagaaatgaaagaggagtttgctttacactctgtggtacgtagcattgatcagggagccaccatggctggcatgcagtgggcatttgatatgtgtttgtccaataaatgaatagcaggcactcaacaaatcatccttgatttgaaataaaagtttttctggattttgcttccagctcactctggtcttctttactctctggctgtttcttctcttccctgttgggttagctcctctccctggcccttgcacttgtcccaggcctgcgaggggagattgacacccagaggttgctggatcgtggtgatgcagaggcatcttgcggtgactcctgggagccagcagtgtcgtggtaggttggcaagtgccggctgcaaaaccctcctcctttgctgcaggtggatattgctacttgatcacagcactgttaactctgcaaccagactgagcctgctgagccttctcggtatagcactccaggttgctgccaccaatgggccacagtggcatttcggatggcaaggaggtcctgtcttgggtagagtaaagagcattagggtgagggtcagaggacctagctctgaatcctggcctctccatttctgctttgtgaccttgggataatccctggacatttcagagccttgaacgtgcgggcttctcaggtcccttcaagccctgaaattctaggattctgtggttcctttggttgggaggaaagaggctctcgtctggtggcctggccgtagaggggtaggattaacctctggggtcagcaagcttgcagagctcaggaaatgcctctctgtgatctgtatttggtccagagacaggtggtggagctagaggaggggaagttcactcacagccctaggctgggggaagggaggcctaactcagctgctgtttttcctaatggaatgaaggtctttggacctgagtcctcagtgcatctagatcttagcaaagaagcaggaagtactggccacgaatcccactgctcatcctctctgttggtggggaaaatagagggatttcttattgctaattaatggaggtttgccaggaatcagggttcatttgctgatttttcagtaaactttatgaagtgtcaattccttgggcagaatctgctctttggacttggagatgaccgccaggaaatcacttcctttgagacataccccatgctgtcttatttcacgggggagtccagaagtatttaaaatgttagtgagtgagttctgttgctgccgccgtactgcaaggcgagggtcacggagtgtttctccccattgtacagaaggagatactgaggcccagagagagttgctcgcaaagctgtgggtctgctggcagctgggagggaggcgcctctgcttgtaagctctcaaggccgcgagtgagctgtaggcagtccgtctgtgtctttgtgaggcgcccgtgagattagccactgagcagaggtttaatttatgatggcgcctagtattctcgtcctgctgcctcctagaatctgctgcatcattggagttgccgagctcccaggggtgtcttaagtctcataagtaatctgtgtctcagccatgttcgaggcagcctcatgcaggggacgggcctcaaggagtggctccgcaccgaggctcaggccaggctcagatttgcccaggtgtggatggaactcgtcggtctaacagggccatggagggaagtggccgaggtgtgggaattataggcatctgagtcaatgttactctctaaacgctctcatttggtcactaatgatacagcagatgtaatagtttggcattcatgactcctcttgatgaaaatggttgaaatgaggacctaacatgggaaagacacagaattctaacaatattcaagcagtattaagtaatgtaagcctaatgtatattgtaatatttttcattaactttaatttaatagacatttatattttaatttgtgatgtgcttagttcttgcaagcagtaacgctgcctttctttaaacaaacgttccatattttgcactttccactaatttagaaaggatttgttattactgattaatgaggttttactaagaataggatgaaagcatcatactatctaaagctggaaggttccttagagattatctcatattcttcattttagagatgaaaaaagactagtattatacatatagatgatcagtgatttattttacatgaacagctttgtccttttatatgaaagggctaccgggatgaataaatggacagaaatggaaaatgttctaaccttctgttgaagtataacatatgtatgcaatgcagcatttgatgaatttttatagagaagtgaacacatctgtgggaccagcatccagattgagaaacagaacattactaataccttgcacatcacccccattccccttttgagactttactcctgctcaggggtagccactaacctgatctctaacagcatagattagtgttttgttttttgtttttgtttttttcttctttgagatggagtctcgctctgtcaccgaggctggaatgtggtggcgcgatctcggctcactgcaacctccacctcccaggttcaagtgattctcctgcctcagcctcctgactagctgggattacaggcatgcgccaccacgcccggctaatttttgtatttttagtagagacggggtttcaccatgttggccaggctggtctcggactcctgacctcaggtgatccaccctctttggcatcccaaaatgctgggattacaggtatgagccaccacgcccggcccatagactaaggcctttacgtaaatgggatcatacagcttgcgttcttttgtctagcttctatttctcaacattaaaaaaaataagattcatccacgtagctgcaagtggctgtagttcattgatgatctctcactaatgagatatctcactgtgactgttgatttcactgatggccagtgaagatgagcagtaggaatgggattttgaacatagatggaggtttttagctcttccattaagttagctactctgtgccagccaatgaggacacagagagactacgacacattttagggatgataggtaaacatataacttgagtgcagtattgatcagcttaggaaaaaactgtgagcccctggagattgggcttatctcttgtgtacttttgcacacctttcttcttaatgattaggatggtgcttggtgtacaggtgctaataaaactagtgggagggtcagcccaaggttgggctggaagggatgatggtgatgggctggggtggatgtggagtcattagctcgtgatgagctggatttggggcatgcacagccctcacaaatgtggctccaagtccaggcaactgctgcctaagtgctgtgagcatggtctcccgcttgggatcgggatggcaggggctaggagctgctgggggccagatgtggctgctgacctggtgtgcaggggccagggctgactgactttcctccgggggctttggctggcatcagtctggctgggggtgggggagccttagaccacacctgcagagttcccatctggggcaatgtgcctgtttgcctggaccaccctcctgggcccatcccactggctcctttgggagctctgggtcttattctgcagggtcaggtcatgggcctgtcctcctgggaggattggggtcagtttggtttgcaggcctttgtggataaaagcatgtcctggggtccagcggacaagcagcagcaggagataccctcccatgtcactcattctgtgccacagaagcccaggccgggggagaccacaccaccgttccaccgtttagctcagtgccctgcaaggcaggagtagcaccggtcatccttggcagagaatcattcgctcttttctctatcatgggaaaaatcttcatccctctacactgtgccagctctttccagatgcttcaaacctttttagttgctaaggtcttcataaaatctcccctctagcgctcgtctttttgcttccttcaattcaagacccagaggggagccaaaatctgtgccttcgcaatatgttccgggtgctgtaggggtgctgggtgaacaagaactgggcctgtctgcagctgctcagcgtcaagcacacaggacagaatgaattcaggacagagtctaagaagaggctgcaaggggtaagaagagagtgtcacaagctgggaggtgccagagctggggggcggtggggagctgacttactttctctttgcccccctctatttctatgtgtgagtcattgtcacttgcttgtgaagtgctgcatccaatctctttacgaatggatgtctcaagagcagttacaggcattgggaaaaaattgagctctggatggagaggatttgataaatcttaattctcttcccagaccaggtcctgtctctctgggaagctgaggccactctccgccccctctcttttctgtgtctccaccataaagtactcgttgagtaaatgaatgaatcagatgcgctgcctcgatggccccgcctccctcccggccagtgtgggcgtgcagatggatgagctcaggtttggacgtgactcagaaggaaggtagtggggaaatacaaggtggtgatctcatgtggcattaaacggagctgggaacatgaagtgtgtgtacgcttctcttttcgtcatttctctcctcattccagaccccctggcaacagtctgccaggatgagactatggggcagccagaggagagaaaactggctccattttcacccgcctgtgagttctcagggaccattctatcttctgcacgtggagtgtgggagaggggcagaggccgtcactgcacagcccaccttcaatgctctgtcttcctccttagtctgcagaacgcacccaactctgtttcgggtgggtgtgggcaggttgacctcagggctgggggaaggtttgattggctttggcattctctgagagaggagtggaagaagcccctgctttagaagtcagggcagagagagggagttcatgtgatctggtggaaagacctttggcttagaaaggagaagctctgatttctaattctggtttggatattagtttggtgtcctgggaaaagtcctttatcccctagatctcagcttctccacctgtcaaatgggcaacacgtgtacctgccctccctaccgcccagagtggccataaggaccacatgagttaatggtatgacagcctgggaaaagtgaaaaatgctgataaaagtaatgtgatccattattaataacaaaccctgtgaacactcagcaccctaggcatcagtctggatgtgggaatcacagctagaaaaggcctagatccctgcctgggcatttgggaaaggcttccatgcctgtgagcttgttggaggagtgggaaccatgcgagtgagtttggaagacttatcaaggaggcagttttgaatgacatttgaaggcaggaagaagatcgtatcaggtgtcagggtgggcagggtggcttcctggagcctgggggaggtggagggtacagagaagcttagaggtgtatgcagctccctgagtgggactcaagccatccacttgaacccaaccatggggcaccttctctcctcatttttgctaggcagcatggggaaggaaagagccctgatggaggagtcagaatgtcttggggtgggggtgggggcatcctgaatctcatctctgctactttctggctgccgtgaccttgagcaagtccctttacttctctctgttccacgtccttcatctgggaataataatacctgtctcactgggttgctgtgaggattgagtgaggcaaacagcctgtaaatagagggtgctcaataaatgtcacttacatctgaatttctctcccatccatctcgtttatggtgtttacagggaatattctgcactgatccctgccagggctcagtattttccttccttttccatggagacagattttgcagttactccagttttatacctatagcccaaactcctgcgttggacacaccaatctacggctagcttgctccagatagcatgtagcataggattccacatgtaatatacatctgtgggaagaaactcagactccaaaggcaaaccttataattaaaagacttttagaagcagagattttgtttttctgttcctccttgtcaaaattacattgttggaaacaaaatctgatctggtggatgtgcgtggcgtagataagagatcactgagtcagttctgtgtgggggggtcgtgatgggggagcagatggccctggtcatgcatgtggcttctcctggccacagagcaccttatctgtagaatgagatggctgcagagatcaggcctacccagctgaaaacactgcaggagagttggggaggatggcaggaggtagagcggaaggacctgcacagctgtggcacctgtggggctgctggctgaggcttcgaggtccaccatcacctcgttttctgccgggcagggactcctgggttggcgctctctaaagccgcttctgtttctaaagttctttgactcatttcttaagcattgcatctgcgtctccacttggatgactaatagacgtcctaatgtactgaaaagcacactcgttgcctccccactcctgtgttcctttgtagatcaaccaggattcttcctccttttgctgcttctgtggctatagccctgatccagccaccgttcgtcacctcgtgcttggattatgggaacagtttcccagcacatctccctgctgctgccctgtcccgacgcgcgccgagaccttctgacttttctgtttaaagcagctgcccctgcccagtcctatcttccttatccctctttatttttctacgtagcatatgatatatatattcttttttctttatttgtcaccctcatgtcctcaaattggaatgcaagctataggagggcttgtttgtttttcctcctggttttgtgcactgccgtaaacccagtaactagatcacatgactaatccgtaatccacagaaactgtttgctatcagtctgcaaatgattgcccactctcttctcatgttttccataatgccagccccaaccttgaggatcccttaaccctggatgtcctgatagcccctgctgtcccctctctcattcatcagacccacctatccttcctgtgttgttagttacccatccctgtgtgtccctgtgaatagatctgatagataagataatcgagtacttggtcttatacttctaaccccctttacccagcacagacctagtatgtaatagaaaatgcccagtaaattcagcattcattcatttactgccaaatttcttgatgaactgctattgacagatgattaaaattcaatcccagaaatattctgggcctttgaaaggtgtgtcctactggcctgaagaaggggctgtgaccagatggtggttctgcactcgtaggtagggtgtggtccttgtttgcagtgaatctctgggagcgtggcagtttcttccgtgtgtcacgttctccctgtgtctgcatccagagtggccgcagtccccaggggatgaagggtgcacctatttctttaaatttccatggagggtcgaaactgctccttgagattttaaaatacgcttcatggtccccacggtgtcaggtagctagtttatgggtcccatcctggttgtgataactcaggctgagctggatgataaacgaaagtgggacagagctgcaggataaatattgctacagggcatctccagcggcacaaatcacagggaaaatatctcccaggcttttcatttctcctcttcctccctggccctctggtagcagccagcaaagcaggatccatccgtcacccttcccccgcccccaccccagcctcagctctcagcgcactgctggggagcgagggatgcagattggtcctggtgcaggcggccctctctgtcttgcggccctctgcctccccgcccagctctggaggcagccccggggagccggcatggtcagggtcatgctgttttcagttgtggacgagtgcttagctttgcagacctgattctttatctctaaaacgagagagattaataactggtggttcttagtctggcgcgagcgggtgctcgtgtcactcaccgggggaacttaaacgccgcttgctgagtcccaccctagcgcatagaatcataaccgcgggggtctggtctggggtgttttcactgacgtttggttggccctgccagcggtgctcacgaggcccactcctggccaagagccactcctggtacaagtgaggactgagatgggcgatggggtgggcggtgcgatgggccagttcgttgaccagctcttgtactagatccatcagcaatgtcgcttagcgaggctttcttcagctttggaggcatgctggcttcgtaatcagcgtcaccctgtaggtgttgattgagcctgcagggaataccaagcacgtaggcatggaaaggtaactaaccgcacgcggcaggcgagtctattaaacagagaggctggtcccagcgcaggttgttaccaccgctgggccctcccaccacctgaccttgaagcgcactcagaggtttctctcactccacgcccgggttctgctgactgtgcctctgccttgtctctggatgccactttcccagttcaggtgctcaaggcgtcttacctgaacattaccacagcttcctgacaagtctctccaagctgtcctttgctgtcctgcaaagtggctgtgcccactgacctggtcggctgtgcctggttggctgtgcctggcatgtggagggtgctcactgtgcccgggtggatgagttcagtggttccctgtcttcccgaggaaagcccagagtctgtgtggctgcagccctgcccgtggccctcacgagctgtatgaccacccgctagactcttcttgtgctttcttgattctgccacgtccttgccgtccgctgggtctcgcctgtgctatttgctctccctgcaatgccctttctcttccctctgccaggcagactgtactcacccgctgggcgtagcacaggtactcccatgggacacctcctcatctatgcccatactggcattgtagcacttaccacatgcttgtgctgttgaaagagtttgtttttgtgtatttttttatttttagagatgagggccaggctggagtgcggttgcatgatcatggctcactgtagccttgacctcctaggctcaagtgatcctccaacctcagccttccaagtacttagaactacaggtggacaccaccatgcctggctaatttttaagtttttgtagagatgggggtcttgctatattgcccctggtcttgacctcctggtctcaagtgatcctgttcctcggcctcccaagttgctgggggattacaggtgttagccactgtgcctggctctgccgtttgtttaaagatctctctctctcctttctgtcttcctccctccctccctcctcctccttaaattataagctgcttgaaaacaggaaccagctgagttgagcccatctaccaagtgaaatgcccagcagatctctgcctgataaatgtttgttgaatgactacagcgtggtgttaaggatgtggaccaggaagggatgtttgtatttgttgtgttctgaccttgctagatgaccctgaataaattcatttatcctccaaaacttcgttctccctcatttgtttgtttgtttttgaggcaggatcttactctgttgcccaagctggagtgcagtggcacgatcactgcagccttgaactgctgagctcaagcgatcctcctgcctcagcctcctgagtacctggggctacaggcacatgccaccatacctggctagttttttagtttttgtacagacagagtcttactatgttgcccaggctagtctcaaactcctggcctcaagcgatcctcccacctaagccttccaaagtgctggggttacaggcttgagccactgcatctggccatttccctcatttgtaaggagagtttacagctgatgatttctagatttccttccaattctaacattctgggattctgtgtgttagaaaatgaagagaggtttgtgtgttcatttccaggagcctgtgtgttctgctgtgtttggggccaggggcttcttcttgtaacaggcccagcacacctggccttcagctgtggcttttttaaattttatttttatttatttttattttttgagacggagtctcactctgtcgcccaggctggagggcagtggcgcgatctccgctcactgcaagctccgcctcccgggttcgcgccattctcctgcctcagcctcccgagtagctgggactacaggcgcccaccaccgcgcccggctaattttttgtatttttagtagagacggggtttcaccgtgttagccaggatggtctcgatctcctgacctcgtgatcctcccgcctcggcctcccaaagtgctgggattacaggcgtgagccaccgcacccggcctcagctgtggttttaattgacatgattaatacctgaggagctcctgatttggtagtgtgagaaggccgcccggaccttacaccccctgccctgcctgtcttcttttcttccttattttctgaggaggtggccaggtgaactggtgaggcttttgtccgcagctctgcgccttgtgtgatatgaagtgttgcggacacaaccctgagtgctgtgcacacgacccctgcagggcgaggctgggggcatcatttgggatgaatgtgctgtcctgcaggacctaggagcaggggcagcatctcacctggggtgagacctggcaagcaggagtgcgctaagcctgcaaccagaactgggagggagaagtggcacgagagcggtcagtcttcctcggccttgaccttgaggacatcagggtgtctgggctcctggaggtgggagtgagacagagaggcagagaaggaggtggaggtcagcgcccggcaggggcctgccaagctgtggcagcccctgtgagctgcagtggcacgggctgccttgcaggaggtgtgagatagagagctgcagacaccaggaaggtcagaagcgtggccaagggaaagccaggcacctcgtccttcccatctctctgggttcatttcctttggtacttgtagaataactttgaaagacccagcctctctcgctgtgctcacgggagcccagagcaagagctgcacttcccagcttgtctggaggcctctaagtgagcaggccccagggtcgcgggagggagtgcatctagcccagatttctttcgctgttgcagtaagtacctggcctttctggtgtcttgtttccaggcctcagtttctccttctgtgctaccctgccccacctccgtggctgggtgtgggaccggcatcgcaccactgcagccgagttgctttataaatagaaagatacttaacaccgaccctggaatcaaacagggaggtggctctggggagcagagttttaaaaatgagcattgatttctgggaatcggcacactgcatattaaacagacccacattggctcccagggcactgctcagccctgcctgtatgcctttctccttcccagtacaagccctgcccatccaagctctcagagggtctgaagagccacgggaatgagattcgtcccagccctcacctctgtgggtgctccctacctgaagtggctctcacgcgcttctgttccctggcttgttcatccatttgtcccctgctgtgagccagggacggtgctaggttctgggattgaaagatgaacaacaatcaccccagtgccccttctcctcttgtctcagcatcgagccttacggagcagtgtgcagagtgagagtctgaatggggggagcccagcgattggagaagagaaggtccaattttgcctgggctggggaaggaagagccttcatggagaaaactgagcgtccaagagaggggcatgtgctctgcacagggaacagaatgtgcgaaggcatgaggaaccacgcggctgtgtgcaagcagctggcatataccaggcacctcatggctgctagttaagtgtgggctggggattgtcacatccgtgtgctgcctgccaccttcttttagcctcctgtggtaatgaaggacattccgtccacatctgttgattgattaagatatttttgtctcttggtccaatcacaatttaaaagttagctgtgaaagaagactaaatagtttaagaacatagctgctgctgagacttccttccttttcctttggtggctcagactctattctgggccctcgtctcagcgaagaaagtatctgtcctacattagggaaaatcccaagaaaaaccgaaagcagctctcccatctttacatcatctgcctccacacctggctgagaatcgtgcacctttcaggccctcctgagttgcctggtctttccttgattacccaccagagcccgtctttaaatattccatgaaaattggggccactgaagtgtgtcagctgcgagtgaaatgcacagagccgagtattaggaaggtgccccgcattagcgggaagagtaccatggacagcagggcaaaacgaggagtggctgggaggccagttaggagtccatgagcaagaggtggccgggggagtggggaggtggtgggacccccaggagatgcgccacactcttgccagcattgagtagccttgtttaaataaaaaaaaaaatttaagctgataggtattttgtcacttaaaaaaatgtttttttgagatagagtctcgctctgttgcccaggccggactgcagtggtgcgatctcggctcactgccagctccacctcctgggttcacaccattctcctgcctcagcctcccaagtagctgggactacaggtgcctgccaccatgcccagctaattctgtgtatttttagtagagacggggtttcactgtgttagccaggctggtctcgatctcctgaccttgtgatctgtccgcctcggcctccccaagtgctgggattacaggcgtgagccactgtgctcggccaagaaaatttttttgagatggagtctcgctctgttgcccaggctggagcacagtggctcaatcttggctcactgcactctccgcctcctggtttcaagagattctcctgcctcagcctcccaactagctgggattacaggtgactgccaccatgcccagctagtttttgtatttttagtagagatggggttttgccatgttggccaagctgtccttgaacttctgacctcaggtgatttgcctgcctcagcctcccaaagtactgggattacaggtgtgagcaaccgcacccagccttaacctgctaggtaaacagtgatggcttggttgttttaatttggatttccatgatttgtaatattcccaagtttacaaccaggaaacaaagaagtgaaattcctaatcacagaatgattcagtcagagccctcttactcaagaaggacaggcgggtgacggccagtgtcctcgtccgccagggtgtgaggtcctgtcggctgtgtctgggccgtgtcttgcccgccgatgggtctctgggcagatggttagcccctggccctcagtcgtgcaggtttctgttctgcaggtggcatggtgtcatgggcacacagggcagtggtgttttcctgtggtggtattgatcagggatgggtagtgctggcctttccccgctgtatgcttttgtatctgccattcttatctttttttatgaactttcctcaccgtctccgctacccacgtatccactccccatacagtgcttagcataacagctgtgctttgttttttccctccatttgcatttctgtcttcagctgtggccggtgacccatggagatgaaggggtttctttttctttttttttttttgagacagagttgtttcgctcttgttgcccaggctggagtgcagtggcgtgctctcatttcactgcaacccctgcttcctgggttcaagcgattctcctgccttagcctcccgagtagctggaattacaggcatgcactaccacgcctggctaacttttgtatttttagtagagatgtgttttcaccgtgttggccaggctggtcttgaactcctgacctaaggtgatctgcccgccttggcctcccaaagtgctgggattataggcgtgagccactgcgccctgccagatgaaggggtttctgatgctcgtgcttatcccggtgcctgacgcttagtaggcactccataaacatctcttcttccctttcctgagagtttagttgcagttttcacaaaatgtcaacgagacgggtggtgtagaacattaacacttagaatgtggtgtgtctgggtgggggtacaggtgggcctctggtcgcgctcacttgcccttggctgtgtggtttgagggtgggcttagctgtgggtcaggcaggttagctttctgggcattctgtgcatctgctgtgggggatctgatggacaatggtggagacaccctgtggctcgcgcccatcccccttggtccccatcacatgtggggatctggttgcttattctctgatgtggtttctcctgggagggcggaggaatgagagttattctgtagctttttctgaagaggaatgtgtgatttgaacaatgctgggcccaggatgccctggattcctctgtcaatgttggcattagacaggaactatcaggagctggaaataggctgcggggcccggccgagagggctcattgtttgtggcaaccccacactcatcatcctgcctcatcctggaaccatggatgccgcagacaggaaggcacctcccaaagtcatctaggaaggaagggaccatgctgggtgcattacacaccccgacactcaccccactctgactccaggtggggtggggttcaaccggcccagggtggtagctagcacctgcttcagtcacctgttcccgtctttaacagctctgtcttctgcaggcttcctgttgcattttaagcccattcctctcattctgccctaagtgaaacaagagaggaagccactgtccccctgcttggagccttcagatgcgtgagggcgtgatgttttccttctgttttggagaaccagcaggaggtggtgtctactctagacatgtgaggcagacagctgagtagaatttgtaacgggtaagatattggcttggtttacaattggttttctctaatttaataggttaggaaggtatagttgtattctgagctaacatcatgcatttttttaaaccaacattgatttgtttcagcaatcaagtgatgaatccatgaataaagagtccacattacatattgtccattccagatttggggcacgattctccccattttgcaggcgagcatgttaaatccagattctcagccagagttctatctggcagatagtggtgagattgacggactcagaacacatttccactgacaagacgtgcaccgtctcttctcacggtacacgtaacgttttggcacatctccatcttgagagtgaatcccagtgtatttcctgcagctggtaaagcttcctggccaggtgcagctccttgcagaaagtaagcagctctgagtttcatacctagaaagtgcgaattctcatgggcggtctacccatgttccaagacttgtgggccattcgtgtcaccattaaagacccagggcattgtttctccaaacattgtaattcagcgcacacacagctacacctgagaaaacgtttcattaattaattcttatctttactgtgtgagataccttctggtgttttctgttttatttttaaaaaatactcttctgggctcggcacagtggctcacacttgtaatcccagcacttcatgaggccaaggtgggaaggttgcttgagtaacatagtgagaccctgtctctacagaaaaaataaaattagccaggatggtggcccatacctgtagttctagctactcaggagaatcacttgaacctgggagttgaagagtgtagtcagctgtgattgtaccactgcactccagcccaggcagcagagcgagatgctgtatctaaaagaaaaaaaaaaaagtcttctgacccactcagccgattttataacccaataatgggtcacagcctgcagtttgaaaagcatggattgaggggttgctacagatgaaagcaaatggaaacaattaacaggttaacttatttggctcacagttaaatatctgttataactcagatgctttatttcttgaaattggattttcaccttctttattttcgtccatgtttccagagtaagtgcctgtcacctaggaagcttggatgggccctttttaacaaggtctccatcaccttaacatcacctttctaaaataaatttgatcttgagacagaggtcttaggatcttaggttaacaggattatttttcatactaaaatgataaacagagctctgacttgtgaatccacgaagttattctatttttctgtgcacctgctgtgtgccaggcgcttaggtggtgctagaggtaccgcacggctcagatgtaggagttcagggccctgcattttagggagggcactggtagaccaggagggtcaaggaggagactggacagggggcttcggcatgagtcacagtggaaagatgggtgggggggatgtttgcttggggaagagaagactcggggcccatggcaccatcttatgtgcgagcggctggcgcccgggagaggaattaggcctctgctttactactccagaggggaagactaattgcattagccagaatcatgatggggatgataattaaaagaaatattatctactgtgtatgaagtgtggtgtgtgccaggcacggaatcgggccctggacgtagatcatcaactgtgtgtggttggacatttattgtatccataattcagacaaggaaactgagatgcagagaaggaaagtgccttgtcacggggcagagctgggatttgaatatgataggactgatttgacccatgtctccctaccacctcatccgcatctctcaggcagaaagtggaggtaggcaggtgggggcccagaatgctaaggcagtgcccatggtagtgagagctgagaaatgacagcaaggctgcctggtgacctctggcctgtgcagaggggaggagattggacataagtaacacctaatgagctcatttcatcctaggacagcccagaagggaggtgggctttatgccccatgaagctcatggggttaagtgacacgcccaaagtcacattgtccctaggagatagaactgggactcacacctgggccttctgaccccagccctcgtgcccttccctctgccctgcactgcctcttactttctgtgattcacttcatcagtcttttctccagattcattttacctgcttctccttgctcctttgctgtatctgacaggccacctgcagcgtcccatgggtgcctgagctcaaaactggaaccacagccagaatccaagctgactgagaggtgttcccacagtcagtgtgtggacatgcacgtgcacatgtgttgtgtgcttgtgtttgtgtgttggaggcctgtgtgccttgggagggggctttgaggtctttggagggcccgtgtgtgatgtagggtagacaggaatttttggcaagttggggctggtggagaaggctgtagccccctggacccccggcccccagtcaaccctcctgtggggcgctaccaaccctttctgaaaggtgggctgggagggagcagatcagggaagttaattactcgattaattcacccagatcagactggctttctgcttgggggatgctctgcttgatggaatgaagaaactgctaatttgctaattctggttactgatggagggtggggggcttcagggttttggaggtaggaaggctgttgctgcgcccacccgaggctgcctggggcccacagcctcctctgagctgatggccttgttcttggcctaaggtgagggagctcttttctctttctcttcctatgactttcttccctcttcctacctttttttttttcactagataccaccagaaaagttggccgggctgcagttcattcattcgtctgcccattcattcattcaacagtgctattgagcaactggcacacgactaggttgtgggagatgctaaaggtaactcagcaggaatacaactggcaccccattctcttgcagctgacaggtctgtccgcaaagagagacctgcccctcaggctgtcagccaggccatgtgattgagaggcagtgagggggagaaagtgggaggaagttgtgtgttgggaccaccaggcggggatctgtgactgggccatcagcctgagaagcctccatgccaagggaggggaggctaattggagcctagaattggggcaggcagagaggtgagccaggccacgcagccctccctgaggctgcaacagccagtcaggagctgagcacaacacagagtggcggagacagggtcagggccgcatggtcggagacagatgcccgaggcaggttgagagctgtctccgggactgaggctcggaatactggggatctgctctgtcggctttgctggggttagggcgtacctgaaagtgaacagtcaaaggcagagctagcgccattgctgatgacacatgcaagtaggagcacccgcggtggccaagtgctcagagaaggcttctggaggggtgggggccccagggtgccataaagaaaggccactctggagtgatttcatgctgcttcttcctttcctttctcttccactgcatccctctgtgctaggcacatctggaatatgggcttgggctgaacagagggatttaggcagatctgagatctgtcccctctcaaagtggggaggggagattttggccaggattttctccgcagctggcgtgacttccagttcttgacagaaatgtgtaagggttaccttggcgattaggtgcaaatgtatcttcagggagatgaacccaaggacagcaatggaggttttatacccagagaggctctagtttggggagagttgctggcggaggtaggagattagctgctgcttggttagtgaaaggatgagccagtcagatccagtcaacaaagaaagcaggggctctcagggttgaacacagttcagaatcccccacagagcattcacagggcaggttatcaacattctgcctccagatacttttaggccagagtgggccccagaatttgcattcatcaccaaatacccaaggattctggagcaactggcctgggacccacgcttggagaagtagttttagagggaactcggcatttgggaaagaacactggactagatgtatgaagacccgggttccagtctactcggtgattggcctcaggtgtgtgccacttcacctttggaatctttttgtaagttgggtacaatgatgtctgctgcagtgacttcctagggcttttgtgatggtcgcgtatgtgaaatccctttgaacagcatacatttttctataattgcaggctgttgtcattgcttctacagttataatagaaatgtccagaagggtctggattgattgaagccagggaagggagggggagggagaagtagaccaaatgatctctgacggcccatagcttctgggatcttccttcaataagaaaatccagccaggcacggtgcacacctgtaatcccagcactttggggggccgaggtgggcagctcgcttgagttcaggagttcaggagtttgagaccagtctgggcaacatggcaaaatcccatctctagaaaaaatacaaaaattagctgggcgtggtggtgcacacttgtagtcccagctacttgggaggctgaagtgggaggctcacttgaacgcaggaagtggaggctgcagtgagctgagattgtgccactgtgttccagcctgggtgacagagtgagaccctattaaaaaaagaaaaaaagaaagaaagagaaagagagagagagaaagaaagagagaaagagaaagagaaaaaaaagaaagagtccaaggaatgtccctcttcccccaaatccaggtagtgaatctatttctttaaggtgtgggtgctggtttggtcttgagagagacaggtagcaaggggaaaggtagcagggctccccgatgatagcaccgtctggatttccttcctctttccctggtgctgatgttgcttcagctgagcgattagagccacgggatgctgccgggagccccgggcatgtgtgacccgtcctgccctgcatggttttgctgacgttctgcggcatgaggttggggatgggaatagcttgcacccggagttcctgttctgtgcgttccttctcaagccagctctcggaggcttgggtgtccatggcagagcagggttggaacagggcctctgtgttgcacaccttcagggggcacagttcacagggaatgcagtgtaactgtcctgctggagtggtgcaatggcagacttcctccctggccagcagggaggcatccttgctttgttactaaactccgctggttccttggttctatagtctctattctgtttcagtgtgcaatgaggtcagcagaaacacagataataacgaggctcatgataagagtagtgaagactgtgttctccctagaccacttccatcatgtttggtttcagcatgcatttggaagcagtcatttaatcagcaagtatttattgagtgtggctgtgtgcctggcactgtgcacagtcactgaggggagacggggcgggagaagggagttgggggactcggcggataagctatctcagacagtagcaggttagctcctttctttggcctgtgcttttggtatctgtctcatgttgttagcacttggaagatgggtgctgtgcttgttctagctttgctggaatttctaggggttggcagggtggggctaggagtcattttgctgtggaaactcagggggtcactttcagaaatggaatgtaggcgtgcccaatgcagctcctgactcactttccccatggctggtggatttgagggtgggcctgggagtttccagtctgtgtagagaaggggtggtggtaaggggatgaccagtctcccccttcggagcgcctcaggtcagcactccttagtgagtttgcttccctacctccaccccggctgccagcctgctgtggctctacgtgctgcagctgggcccgcagagcttaaaatagcagcgtgagctggccgctgggcatgtggggagcccgcctgaggcctgatggggcagccgcctgggcttggggctctactggctttaaccactggggtagagagtgttttggggggtttcttctaggcccagagctggagaatggggaatggatgtagctggagttcgggtgtggctggtgcagaggggaagcaaagggcttgtctttcctagacctttgaataaagggaatgcctcgaacctgaccttggaggctctcactgtggagctcaggggccttcagacttggtgttctgtttggccttagctccggccctcggtactgcccagggttagccatgtagggtcccattagaggctaaatgaagtgcgaaggtgggatggaggatgcagctgtgccaggtcacagatgtcagggccagggcaagaacgcaggtatcctgagtctcagctgggcaggcgctaactacagggctccctcactcgccagttgcctgctcttgggaagccaagatggcacctaggggtttgggagagacctttcccaggcattcatacattctttcaaaaatacttacacctgtcttgtgtgaaactgttcgtagctttgggaatacagcagtaagtgaagcagagcaggagaagagagatggagtgtgctgggggaggtacagttttgaatggggtggtcagggaaggcctcatggagaagatgccatttgagtggaggtttacaggagctgagaggagtggcagtgctgagatctaggagaagaatgttccaggcagaggggacagccaatgtaaagtctccaatgtaagaaacagcacagaggacaatgtcgctggagtggagtgagtgggccaggagtttgtttgtgtgtgtgtgtgtgtgtgtgtgtgtgtgtatacacacaagttcttctaagaactttgtctttttctttgagagacatgagaaggcattagggggttttgcacagatcagtggcatggtctcacttaagagacacgatcactgtagtataagagctaatttcagttgtgtttttcttggggaggccccaggagaccagacagggggctgccccatcctttccctatgactcgtccagcctctgtttctattccccaagctctgacctgagacttttactcctggggaggagggggcaggatggtgctggatttcttttctctgcctggagtttcttttggagggagggagatgggtttgttacagttgtttgctggagcctacttgtactggttcttgagagcctattagaaagtaattagaacatttgcctgccagtagcttgaaattggctgtggtgggagtacttacaccatggcattggcaagcgctctgaatcggggcttttcccctgtagagctgattgttgaacgtctgccagcccaccactggattgttacctctactctacctgtgctgtgctttcagaggggagggcctctgttttctttcacttggcagatcacctgtgttcatgccgtgtggtcagaaagagcacaggggacactggatgagggtgatgaaggttggggttggcggggcagtggtgtgttttccaggattggcagggcttgtcctttggtgttgtgatgtggggcgtctctgcttttcctagctgggtaatcctaaatgcatgagtgtcctctcagcctgcttccttccttcctctgcctgcctttgtgcaggtggcatgggtacgtgtatgtccaggagtggccagcttcgtccataaaagcagggcccagcactggacccaggtaaggccgcttggtgtaaggaaagatcactgttttcactgttttggaagtcaggagacataggttccagtcccagctctccttacttgcttagacgagtgctctcccctctttggccctttgttccctcttttacaaacggagacaacttccctgcttatcttgcaggggtgggtgagggccagatgtgatcattagtgtgagagcccctcaaaaaagctgcaagagtcaccatgaacaggtcttggcttgcggtattcaggcacgcaggcctctctctcctctgtcctcattctgtttggatgccatgcaagcccaacacgtaccccttctccaagaagcccttcctgatgggccagactctccctgggcaggtcctcggggcactcccaggctgaacctccagtccttgcatgtactcaggggtacttctgtcccaccctttcatttgattgctctttgcccagatgcagatggagcgtttgctctgtaatgctaattctccttggcagcatctgcagtggcaaacccagggtggcgtacctatgggtgctggggaactctgcagggactgattcatcagcataggtgtctcgcttttatcgagctcctatgaagtgtgatggctggctgtggtgtgtgggggtgaaaggttccaaagacaagtgcctcccacttgataaagtagtttcccagacactgcctcatctgtccctcatggtcacacttaaccccattatactgatgaggaaacagaggcatgctcacattcattcattcattcattcattcaagacatgtgtcctgcactcagggagctgtcagtgtctccccgggttccacagcactggggtggcctgctctgtgccctgccaggctcctgcggtactactgtgcttgctgtgtgttcatctctgcaggaagcagacagagcggcagggggaatatgcattcatggagggatgggggctgcaccagggtgctagtcaggtacccgggcctgggtggcagaggaagggagggggcagcatcagtgcccagggtgtgtccctgctgtgtccggctggccgtggcttcgggctggcatttcctctggcagcagtgtgggggaggggaagagcaggtgtgccctggcgcctggcctggctgggatgtggaagcgcctcttggggccggagcttgggggatgagtgacgtgcagccacctggacacattgggcctcacggagcccagccacattctcagagctccaggctggacatctgagccccccggtggtttctgtagatggctggatctggtgggtgactccagagagggcctccagagaggactcatggtggtgatctatcaaggtgaatacctcccagataggccgagggcagtgttagagggtgtccgatacatacactgaggtgagtatgtgtggtgaaggtgggggtgaggctcgggggctctgtgcattgtgggagggactcagtttctctttagtttcctaagtgtgcaccatgtatggggctgcgctggttgccgcagaggagcgcgggtgagctctccccgcttggagcttctagtcttgtacaaaggaaaagcatttatgcaaatagctgtcatgcaatgcagagtaaaatcagtgtccaaaagagatgactagaacaagaagagtgcctcttcattttgggggatctttcttggaggatgtggcatttgagatgaaccttgaaacatctcctcaaggctgagcaggatgggggaggcttcggaggtggagggcaggtgcatgcaggcacaggggtgggctgcaccttgaggggctggtgttgctggaagcagagggcacagctctgggatttgtggggaagaaggctgacagagtaccatgtagaagggccccagtgacaagcttgagtatttgtgtttaaatccctggggaagtttttgagctgatggcatgtgccaagctctgccttgggccagtactagtggcagcatgtggcagggtgactacagagggagagggtgcagggagcctggtcaggagactggcagacaggaggcagcccagtcacgtgtgactgggttacaacaggaacagacctgggctggagcaacctaagagcctttgaaagcaccttttgggactgtaagaggcttggtagcctggatggctgattcgagggtgtgagttgtgactattttcacctcaagtaccttgaaatgagaaaagatgcctccaggtttcagacgggctggatgcctttaggaggccccttcagtgggaggcaccttgaatgacagccccatagctatgggccagcctgatggggaggagggaagagagatggagtgagacgacagccagtgctcctgtcttactttacagagcagccgatggcagttcagaggccacaagtgacttaatgcactgcgggccttcgagccataagacagccattagggatgcccaagtctgtccctgccacccatccagacacctctcactctatcagcgagagtggaacatgcacaggctccctcccatgagggctgcagagcagtgtggaatctggggcgctggttcttctccatcttcttcactttacagcacccccaagtgctgctcacacactgccttcttccacattggctctagtaccagccccgtagagggagagtgggccgagggaggcagcaggcagcagctcctgaaatcagcagaagggtcccagctgcacagtcaggctggatgtgaggttgcagagcgccgtcccagctggcaagtcagcaccctctgtggagtggtttaggaatattggatttgctgggtcagtccatttccactggtgcatggtaataagtcgcaggcttcatcacacttccgtgtgcccggcggtctgccttatctcatcctccccgcagccacctgccttccttgataagtactaataacaaatgccttctttctcctgttttccaggagcagtgggctcagtgtgtgcatatgtgtatgggcaggtacatctgtctgtccagcacagtggctcttactccaggcccttttgaggatctgacagggatgctgattggccttaggatgaaagatgggctgctttggaactttcctgcaaaacagggcctgagagcccagagtgggtgactctttgtccaggcagactatcagccccgttcttctagggcccaatctctgctgccccctcttatctggtaaaccttctctaagaggagatgcctgtcctgcaggagtggccattctaactctttttgtaaagcttgccctgctccaagcaaaggctgatttttctaaagagctgctctcaccttaaggtgcacacaaaggttcttcctgttgctactcatgcatttagcagtgactttagagcaccagtgtgctagacaaatgccaagtgcttagaagacaaagaggagggacacagtccttgcattcaaggagctcacaatttgggagcgggggaaggtcagggaacaggtggcatcatggcaggattaactatgcgttattggtataccaatgaggcttcctggaggaggtgacagcaccctgatgccaactggattgtggatgttagccattcggggtgtgggggaaagggggtttcaggcggagggagcatccagtgcaaaggccaggggatgagggggaatttgatgtgggttaatttggtgggagtgtaggccaagaaaggtataggagagggagttgctgagaggagtggggtgggcaagcacctgtacagattttaaactggcatccagggtcatctgtgctctggcccaccctcctttcaggctccctttctgcaaagcttcattccagtggagcgtgtgggtgcctcccaaatgtcctgggccctctgctgtgccctggctctgcccagctgcccccctgccagggtgctcttccccttcccccctgcctgtccagtgccatttcatagggtgcggatttcagggctccaaggaaccttagagaaacaactagtccagtctgcttgttttgtagttgaggaaccagaggttgagcaactagaggccacacaggtcatcagtgtcctcaggctttgttccttaggtggcacgaggtgatcagacacctggaaagccccggaagccctccctgctggccctgcctgccctgtgcctgccctcccttgagctcctctgcatgtgttcatcaggtattgattgggcccctaatgtaggtcaggaatagtactgggtactgggtgtaaagcagtgagggagacataggcagtctctgcctttctggggttcatggtctagtagaagaatcagatagtaacattgtcaccctaacaaacatggattttccaatgatggtgactgctatgagaaaaaaaggggcaaatggtgctgtgaggagttgtattgaaagaaagggggctttagttttgacagtggggggcagccagaaaactagaatagaccttcttcaataattcacaagagctcaggggtgagtagagtgaagccaggcagtgggtccaggaagagcatccaagcagagggaacagcatgggcggaggctctgaggaggtcagagcaccgagagttcacggctgtggcaataatgggtgagcagagaatgttggacgggggctggagagaaaggcagggatcagtcatgccggccgtttagggttgctctaaggatttggactgtactagaaaagtagactaggaaacacacaggcacacacacaattgtaatccaagtaagatgggaagccactgatgaggttacagtggagaggcacatgagtgggaagattgcattggctgctcttggtgaatgggtgggcgcaggagggaatggaaggctgcaggggctgccgcaggaccccaggcgagccatgaagcagggctggacaagggcggggacgaggaggatgccaggtgcagggaggctctgcggcttggacttgtgtttgcttcgaggtgggagcaagtgacaaccgggagccaaggatgagtctgaggcttctggcataagcagtggggtgaaaacttaagccatttgttgagaaggagcggatagtgccagggagcacatccggggcaaggtcagtccctcctggagctgtctgggagacagccagggggatgacaagcaggagttggggacctgtgcttggggctcaggagacaagtcaggtccaggtgtgcatttagggggtcaacagcatgcagatggccctggaacggaggagatggtcatatagaggaaagttgggcagaagagaagagggctcagagctgagggcctccctgaggaggaggaggagggcagccagcatttcccttagaatttcagccacacaacattagctattgatgatgtttctttctctgttcagctacactgtagctagacaggagctggttccatgttgactataataagtattgttgggaatgataatagtgcctccatccattgaacagcttctgtgttccctcgtaacctttattccttatttttttacatagtgctggggaaggtgcatattatttccattttctagctgaagaaactgagatatggagcaattaagtggtcattctaggcatccagcagtggggtaactcactctagatgggatttggacacagattcatctagtcccaaggcccagagtgttccccctttgttattttactagagttttgttctctgtggttgagttggatagtggtatggacaggggtcattgaaggcatctgagcccagctgacccacagtaaccagggcatgtggtgtgagccgatttcggggacagtgggagtgaggttggctttgtgacaatccacaccacctgcctggctcctcatggtccagaagccacattttcagtactcctggctggggcaggattgctgtagctggtttatagctgtgcccgtgtttcctcggcgctaagctaactgatctttccgaaggccccagtacatgctctgagcagtgtgcccacctgtcgtgggtagactgtacacacagccaagggtctctgcatggccatgttttctggtagccagaagtggcctctgacaagggctgaccgtagccggggggcagctttgctcttgggctttgagaggtgacacgcaacactagggaatgtgtaagggttcaccagagacttggagctggggcagcagtgctcctggctgtgctccgtggagcccctccaagaggcccagcccactccgaatgggcagaggtcgaggggctgcctgtccctgacttgctcctgtctcagtcttctcttttttctacctcagatctttcccacttcttcctccatacatttgtttatctgtccttctgtctgtccatccatccatccattccaggctgtgccacgtgctggggatatggctgtgagtgagacagctgaccgcatggcatttgcactcttatctgtagctgggtgtttcagcttgtcaggttcagacgcccttggatagcctgctttccaggaacaattccatagatttctggcttgggccccatcctttagttaatgaactcaaggctgtcaggctgtccttgaggagagctcaagatttaggcacgctggtctgcctttcccctccgtcctccagcacttcctgagtacctgctgtggggtggtcactgacaggcactgaggggtggggtaaaatgacccagacacagcctctgctttcttatagaagctcagtgactggagcagaggcaggtgggcaaactgtagttggagtctgaacaaagggccaagaaggagggaggagcagacctttctccagagagggaggtaccctggccaccctttgtgtccctctgtctgtgaactttcccaccaaagccaaaccctgcttgtttttttcttttcttttttgagatagggtctcactctgtcacccaagcaaagtgtggtggcacaatcatggctcactgcagcctcgacctcccgggttcaagtgatcctcccgcctcagcctcctgagtagctgggactacaggtgcatgctaccacacccagctaatttttgtattttttgtagagataaggtctcactatgttccctaggttcatctcgaattcctgggctcaagcgattcacctgccttggcctctcaaagttttgggattacatgtgtgagcaaccatgcctggcctttcttttctttactagtctcagaaacttaaaaaaacaaacagattaaaaacaagtaacagtaccattccttcttttctaccccaaccctttcaccatcgatgttaccgtccttcctgaatcacggccaagtatggtaacacccaatctcctagcccctgccctgtagcctccccccaccatgtgggccccctgctagggatctctccattgttctcttttggcacggttgctaaatggtttgctcggcaacgaaagcattttctgtactgtacagtggaagaagatcccaaatttggagtttaaaaattggggggaggtgagtagctctcccttctaaaatggtgcccgtctcacaggctcttttgggtggcagtcagcgctttgtgtctaacctgaaccctggctttgtgggaggctgccttgtttgaggcttaaaggcacagggtgcctcacaagctgtaccttgtgtcaaatgtgggaatattcagcatgggtcagaaaggggctgtgggctggcccattggttctgattgtgtgtgggtgagggagagaccaaagactgagccctgtctcatgctgccagcctgaggaattcacagagaggcagagagagcttggcatttactccaaagcccacatctccccagttgccaaccagcagagatgtggcatgttgatttcatttattcacttttcttcttcccctctgagaatgctgtagttacttcactttttttgttaaaaaaaaaataaaagaaaagtgaagtcaggctgccttgttcacatgctcagagagccccctgaagggcagcctgcacctgccagcttgcctgggtggcaagctgagaatgatcgggagctgccagagggatgatgtctcacagcaccatttctatctgattgttccatctgtacccccaatctaaggaactgaggcagccacagccactggtcttttcatctcttgcctctcctccaccccgatgccagtgccaggcccagcttcctagggcaccggttaatcatgggccccactgcttgggaccctgcaggatgcagcccaggcttttcatatgccatgcaaggcttcacagggtagctcactttgacctctaagcaccttctcttgcttcagtcaggcctgtcccctccctgcctcccgaaggtaccacactcacgcctttctagggtggccacccacttcagagagcccttctgcaagggacagctcggtgcccatcctgccacggtctgtgctctgtgcatcagtctgctttgggcttctctagctgcagtcgtgagtgggggtagaaggtgggtcgcttcagctagatctgagctccttgaggcccacgccttgtcttactcagctcagctttgtgtcttccgtgggtccttgttccgcgtcctcttatcttgaacaaaccagcaccaatggatggtgtgctcatggtgagagagggaggaggagggacgtgttcctagagctgccttcctgaggctgctctaccaccttccccctaagataggactagattacgctgcgtctccccacaccagcttccttcttccagcctgtgtcaggtaactcaaggccatctgggtgatgactcgcctttcttattagcagtccaggagcactgccccttcctcagggtcctttcatctaatgacatcacatcaggacatgatatttcaggttccccgttgtgctttaagagtctgttagcctggaagattcttaagggcagaaacttgtagagtctaagagagtgtggtgcatgggctgtgaaatcagttttcttttctgtaaaatggggataatagggtgtacctatcttgtagggttgttatgaagattgagtgagttactttgtgggaagctgggtccctggggtaaataaagacttatacgttaaagttgcttttatgattctgatgactaagctgagtgccctgatgggacttcactacagctttgctcagggactgacaggtgtgacttcagtgccctttgacaagtgtgaccagaggaggcagaactgttgcattgcagcctccacttcctctcctacctgcctgttgtttcccctacctgctggggaccatcccaaccccaaggccctcagacttctgaggaaatggttagtggcacaaattcatttataatcagaaatgaagatggaaagatccagggacaatgaggcaactattctgcctggacaaagtgtgagctgggcagaagagatgaaaaagggttaggaagtggagggggccaccctgcgagggccctccgtgacaccaggcccccatctgagactggtaggatcagcccctccaatttgttcagtctcatgtcctcagactctcctcacatccaccaactgactttatgcttgtaacacctctagggggtaggctcttttaatccccatgttaaagaagaggaaacgggagctcagaaaagcaaactgccttgcccttgatcacacagctaaaaagagctcaaagtgaaaaacaggtctcttgactcttggtccagctggtaaatgatctatccctgcatcaaagaagtaatgttgtgagaatgaagcggcagccgtgggcccctcaggagcggccaggtgaggctgcagaggacaaaaggcattagccatgccagtcaggcagccctgatgctacatcaggaggcgactagacatctgccccttcatctccagacagcatcggtgggactgctatgccgaacccagagagagtagctgctggtggctgtaatacacactaggttttattcttgggctccccatctgagttgggaaggggctcaggatggtaaaaccactgcagtttcctttaaagtaggggagctgcactcagaatgggagagctccactcagaatgggagagctctcacctctaggaggcgggcctgccagggagccagtgaggctgcaggttcaccagcacaagtcaccaccagcacaggtcaccaccagcacaggtcacaccagcacaggtcaccaccagcacaggtcaccaccagcacaggccaccaccagcacaggtcaccagcacaggccaccaccagcacaggtcaccatcagcacaggccaccaccagcacaggtcaccaccagcacaggccaccaccagcacaggtcaccagcacaggccaccaccagcacaggtcaccaccagcacaggtcacaccagcacaggtcaccaccagcacaggtcaccaccagcacaggccaccaccagcacaggtcaccagcacaggccaccaccagcacaggtcaccatcagcacaggccaccaccagcacaggtcaccaccagcacaggccaccaccagcacaggtcaccagcacaggccaccaccagcacaggtcaccaccagcacagctcaccaccagcacaggccaccaccagcacaggccaccaccagcacaggtcaccaccagcacaggccaccaccagcacagctcaccaccagcacaggccaccaccagcacaggtcaccaccagcacaggtcaccaccagcacaggtcaccaccagcacagctcaccaccagcacaggccaccaccagcacagctcaccaccagcacaggccaccaccagcaccatcagcacaggccaccaccagcacagctcaccgtaccagcacaggccaccaccagcacaggccaccaccagcacaggtcaccaccagcacaggtcacaccagcacagctcaccaccagcacaggtcacaccagcacaggccaccaccagcacaggccaccaccagcacaggtcaccagcacaggccaccaccagcacaggtcacaccagcacaggccaccaccagcacaggccaccaccagcacaggtcaccaccagcacaggccaccaccagcacaggtcacaccagcacaggtcaccaccagcacaggccaccaccagcacagctcaccaccagcacagctcaccaccagcacaggccaccaccagcacaggtcaccaccagcacaggccaccaccagcacagctcaccaccagcacaggccaccaccagcacagctcaccaccagcacaggccaccaccagcacaggccaccaccagcacaggtcacaccagcacagctcaccaccagcacaggtcacaccagcacaggtcaccaccagcacaggccaccaccagcacaggtcaccatcagcacaggtcactaccacagctctgtgatgagggtctggaagtccctctggctggaattcatgtccccctcccaccatggccatgcctgttgtggtagctctgtgtctgcccatttgtgctgccttggtgattaatgccctcctgtcttcctaactggattgtggctccctgaagggcagggagccccacttctcatatctgtttcttcgagggcctggcccagggtttagcacacagttctaggtgtgacatgaatacctgctgggatccagggaggacttttcacacccaccgccccaggtaggacatgaattcttccatccagccatccctattgagcacctcccagaggccaagccctgtggtaggggatggggttacagaacctggtaaaatgtggctcttgccctcgggtgctctcagtactctcttcctgagcgactggaagggtagcagaaaagagaggtgggctccccacccgcaagtcttctaatcctcatcatttgcaaagtgtggtgtcccggtcggcaatgcagacttctgcactagcccaagggaggctgcccagttgcagtgctttacggtaggatgttcccaagccccgagcaaaagctcgtttctctgacctcacgggagagcacccagacagtggccaagggcacccctacatcactcttggcacaggcggggtgaggaaaggcaaggtaggaccccgcttcgtccacctgtccctgtcagcctgcctggggttccagccgccgcagcgtcccaaccgagaacgcggggcaagggttcgcgcagctgcaggagcctggcggagcgccttgtgtgcgcgcccgtgcgtgcgcgccgagggggcggggagggcggcgcgcaccccgcagaggcccccggcgctttccgatacctcgcgcctccctgcggtcccttctccctgtgcgccctagccagacccacgtgtgcaaaggcatggaggggggcgtgtgtgtgagagtgtgtgtaggtctatccgggagaccgcgtgccctggccggacaggcccccaagtgcatagggggcggcggccagctcgacagcggccgcgcttctgtccccctccagtccttctccccagacctttcctctggcttgcttgggccgtgggtacctccagccatccccctcctttcgccgcccccttgctcgggtaaaagagaccagcgctttccgttgaaggttctggttcacccctcagctgcagagcccttgacatttagcgagtgctcgcggcgcacttgtttaggcacacagcagaacgctaatcccattaaagatagtgtgtcattggggagggggtggctccccagcggggccgggaaggcctcgcgcccattggtcgaatgcaaagcagggggcggggccgagggcccggggagggggctccaggcgatttcagagtcgcgagtcggggccgggatttcgcagggaaagcccagcggttgcagctgcggcggatccctcggcactgtccgccgcgcgccggggcagcccagggccggcggcagctccgcaaagtcgcggaacgagaggaggcggagcgccggccaagtggtggggctcagcgctggggctgggctgggctgggagaggtgtgcccagggagcctggatcccggtgcccttctccctcgtgtggagcggccagtgcggccagaggcgagctgacggcctggaaagagaaatcaaattgcagcctccccaaagacgctgagttacgcgggcgagccggttcccggggatcgttcgcgagcgcgcagagagccgcgccgcgccgcagagccctcccggggccgccggccagaagcggggcgccgtccgacaggcagcagcccctgggcgcggggttcggccgcgagtgagcccctgtgcagagagggggcgtgcaaggctccgccggcccccccgcagcccgcgcccgacttgggcgccccctccgtcccattctgggagcgatgccccccgctcctcgcaccccccgggaacgccgcgagcatggagaagtcgagtagcgaggattcttcgatccatcggagtccatctttggacagcaaggactcggactttgccaagccgtccacctccggccgcccgttcggccgcggcttcacggccggcgccttctacggcaccgcgggctcccggggccagagccgcgccgaggccggcgttaagaccgacaagtgcaatgcacccaaaggcagcaagtacgtggtgttttacctggacctgtcctttgtgttcctcctagaatttaagaagtgcaacatggccaggggctgcctctgctgcttgaagtacatgatgttcctcttcaatttgatattctgggtaagtccttccgtttctctctcccttcgccctcttctcctcctcttggcttaccatagcgtgaataccctctccctcttctgtgctgcattgctctgctctctgcacagtggtaagtgtgcttttaaaaaaaaattgcccccgcccccctttcatgcacctttgtctttcctttctccctctctttggtggctgaatgggggctccagcttgcctgtcttcaggagagacttgctctactcctaggaggctggcaaagtttggcaccacctccttcccctataagaaaacccaggctggaagtgcctccgactgggcagcctgcagtaatggctgtgggctcagaatttgtaacagctgtgagcctgagttggagataggcacaagtgaggatgtatttctgagtttcttcttgtattcctcctgaatgcacaagaatacaatctgcagcattttatgggagtgggttggaggggggcggggtgtagaggccacatgttcccactcctttcggtgaatcctaggaaaaagaggaggagcccctggctcaagccgatggacctgcttgctagtcctcagatatgctcccgagttggggcctgggtgggaaaggaggggtgtgggggcatgctgccatcgggtggctggctgctgcttttgagggattgcagtggaccgggcagggagctggctggccacgtgcttccaggttctgggagccccagtggccggaagggacaaagggagacaagcagggtgcccctgtccttggtgagaggcacttttgtagagaaggtatgaatgggtagggcagctgggaattgctctctgtcctctgtgtgactctggaggctgtgcgcacatatgtgcacgtgcataagaaatactggttaggaacatttgaaaacttcttaaattcatctcgaatcgttccttcatcccaattgccgtctctgcctttcttcacccaagccccgacgtagcacagatgtttggctcagtcccagagtctgtcctgccctctggaggctgtcagctgcccactgcccgtggtccaggaggagcactgggggcaggagaaagtcattcagagtgaagttgggaagaagcagttgtgccgaagaggcattcagcttttgtgtggagtgatccacattagccgaaacactttttagggtgggggtgtgtgtggaggggtgacttttcccatagaatgacaagcgcaggaagaagactgggctctagtcttggttctgcattagcttcttgtgtgaccttgggcaaatcacttggtccctgaaggactgggcttcctttccagtccaataggggctgtcgtgatggtctccctgcttgtcctcacgtcactagttacatgccatctggggtgggggcaggcatcctcatcttctctcttggggagagaagcccccctccctgcctggggtgtgggctgcttttccaaggagactggtttgaagtgacttgagttggattcccctagttgtcaccatgggttgggccctccagccaccctagtaggaagttacctgtcatgtgcctagagttttatggaagctggggcagatagtctcattctttttctggtggcaagcaccactggaatgtctctggctgccttgtgggccagtgcctcctggtcctgtgacccatctgccagcatctgtcagccaagtactggtgtgtgcttccctggtgcctttggattcacacgaatgctgtccttttcattgttcacagcttccttctccattcttttttgtagtctcaacttacctttttgttttgtcccaccctgcctatattaagccttattaggaagacagaccctggggcttgtaaccccactcagctgcgctcactcctccccacccccaccctgccacctgctggccggagttggtataactgcctgcggtgcctttcttctccaggatgagcccaacgtggtttggtgacctcctcactggctagtacagtgatctgtaccctgcacgttgtaggccctcattatatgtttgtgaatgaatgcatggagggccagagctgtaaatccacaacatgttgtcatgtggtagtggttcctgagttccacttgatggggaagagaagttagatctcacacttgcctctgataaaggctctccgagcgccatagctatgggatgacaagcaattcttcccatcttcccttaaaaccttggcagaggttaatgagctagttggtggaatatattttcgttacggttgatagcgagagaacttgctgtcgcttcctaattagaaggtactgattacattctctttaccaggcaaggagttgttctctcctggattctgacttttctgattacttaatatttccagaattcccatgacatgctgtaagcagggaaaaattgaatctccaagacccacttcttgtatgctagtagcaaatgagatgattaaataagacatagaccttaggtaagatggggaatttagcagaagacaagttcatgcttgtgtgtaagagtgtttgccactgtgtttatcgggaggtggaggagcaggtgcaggagggtgttggccaggatgtgggggctgtgggtcactgtgctccactcaaatgaaggcttcctgcaggctggtgcttggcctgatactggggaaggagcagaggaaagagcagaatgggaagggaaaacatcaaaggcaggtggggtgttgatgagtcagggtccctgggaggcctctgttgctgtcttgtgcaggggggcagggggagcatgcaggctgggtcaagcccagccctctgggaccgggtgcaattgttaggaattttgtagccttaacttgttgtagtcttgtggctcagatccaaaaaggaggcttttctgaaggattagagttgaacctgagggctgcgatcaatagatagaactcttcccatagatcccggagcctaccaggtatttctccaaactcaccgctgccgccacaccaccccgccccgtgcctctgagcgcttgggaggattcccatgtggaagagaggtgcagctgtcgtacactgcaacccttcagaggcgtgcataggttcctcaccactgggcggagcttctagggtactagtattggtgagggctgggtgacatcactgggggtaggttggcaggtggagccacacagcccatggtcctcctccttactaagaaaagggcaggtgcctcacaggctgctgggtgcctgcctgcctgtgggggtccaggtctgctcctgacactgcgacttcaaccagacagttctagccatgttggcagcccagtgcactgtgggaatctggggcctccaggagggcagcaaggtgagggtagaggagagggagtcagtggtcactcctgactgagtcccatctcctctttgtcttctgcatcccctgccccgactctcagggctaaagacaatgctggcttctaggtggatagggaataggagatttgaattgggacaaaagtttccccatactgaggatcctgttctccagtaagcacactcaccctaagggatttctcctagcagtgaaaaccatctgggcattttcctcagtcagccccatctctgggtcctcctggggccatctggtagaatactggtagtagagattaaatgattctaagcccctcccagggggcaaaggagactcggagcttcaaactgtgagtagagaagagcgtataggggtgggctggaaaagggacctctgaatgctggggtcatgtgtacccttcctggggcagcaagtcctgatcccgcccagctcttcccagcccaaatcaagttcctgtctgatgtggaggggtgggggcggggctggggctgctggcgtaattgctacttaggataatggtcatttttcatgcttgccagcagagctgtcccatcactttaaattatggctggcagagcagtgacattctggcccattggaaagcctattccttgtggatcgctcccttaatgaaggctaattagctgaggaggccgtgttcagccagcctgctggaacagggaaaaggttggcgcagggtggccccgggcagagtgctgatggggccctgattaaactcccttaagtgaggtcagggccctcgcagacgctggctgcctttgggtgcaggcagcatggtcgggctctccagctgcattggtggcacgtgcttagtactggctcggccatgtcacgagtgcctctgtgggctcgggctgaggtctgtgcatggtcagtgttgggtggcctagagtgtcataaggagtctatggggtgccttctgtctgaaaacaggagtagtgagtgggctcaagggtcccagcagggagcttgggttcagacctggcctcacctggcatctccaggcagaggagacacagggtaacctgggcagcaagaggcacttaggccccccccccccagagtgctcaggtgtgaggggttcaggctgtcttcctagggggctgcaacaagtagatcttaagggtgggtcaggctggcctctgctgggggaagggggacaggtgcggggcctggcagataccccaagactcctggaatgtggccgtgagggaatgccaggtctgtgttcacttcctctccacagcattaaaaattaaacttccttgtcttaatgtctatttttaaatcttgtcagagcaagcattggtgtcaatcaggagggggtggggaggaggcgggtagagaagagaaagtcccagttgaaaaagggtaagcagctcgctctagcctgaggaaggggccgctgggccctccaccctggcctgtgaagagcacagaaaacaccctccggcctgctcctatctccatgtgcctggctgcccttggctgaacttggtggcagactctgtggccagaggcctcctgtggcttatcagggtgctggggtcccagttgggtccattcactcatgccacagctatttactgaatgcccactctgtgcacaggatcctccagttggtgagaatgggctgactgggctcgcagagggcggatcagttttctcgtgccaggaagtcgtggaatcgggaggtcatctggctcgtcctgcgctgagcatttgaacacagggctgtcaagggagaggtgagagcattctagggtgaggcagcagcaggcctgcacccagagccctggtggcctgacttgtcctttcctcccctctacacccacacagccactttctgactctcctgctctgaaatgtttattcctgtcagtaagagaggcaagaaaaacagccttccttttgttttgttttgtttttttttttccttagtttgaaaaaaagaatcagcgaatcctgtggcctttctgtttcttccactgaaaaggctggcagatgctctgtggctagttgagcacctgccgtaagccgggactttgagctgctcagagttgcatggagaagtcagacacataagcagatcattacagttctgagtggtagctgcttaatagagctccttaatggagtaactaatactgcgtattagagacaagatatagagataacagagtagagcaagtgacacctgggttttgaaggatgaataggagcttgctgattagatcagactagagggtccagggcagggagaagggtgggaagagagaacacattggtccagagcctatgccaggggagagctagcagtccaagggggagacagcacctgctggacacatgcaatgggctgaacccagagaaacaaagggtcgtgccagtctggtggcacccttcaggaatggcttctgggggtggagagttcggagtgggttccgaagtagaggggcactgcagcagtgcctggggatgctggctttccagggctcctaggacagggttgttttgtttttctggcagagaccaccgtgacaggtcttgctgtgtcactcgggctcaagctgtcactgtaggtaatccagcttcagagagatgcccctgttttctcccccctttccagcctctcccatccagctgtgatatgcctgtttatttggttccagttaggaagctttgaagctgagctaaacccatcgggcagagttaagtcttctgagccagctttgtctctgctcacatttgaaagctaatctgccagtagaagtggtggggggttggggtctgatcctggcagggatgttaaaaatggcacacggtcaggcgggggagcagcacaaggtcgagatgtggcttctaactcgactctttaaccagccatgggacatcaggggagatctgaaacctcttctcacttagtgagtccctggtttgattcaggtggggtctacctcctctcctgtgcgccccagcaaactttgaggctcccgggagaactggagaagcccttgggcaggggaggctgcaggatttcaaatctcccttgcagtggctagctcactgcgtcaggaccacgcagagaggccctgttttagtggctggtggggggtgggtgaccggccaaggaggagagggacagggccctgctttcaggtagctttctttccactccaggggttcttcactagagtggatgttcgcatcagccaggcagcttttacatgaacaaagcccctcctgagtgggcgcctccagaagtgagggctgtgttttgaaggtattcctttaacctcttgctatctggtttcctcaccttggactataccacctctcctgtagggccgtgctgaggcctgcaggaggtgctgtgtgcatgatgcaggtgtactgctcagcaggaggcctggcgccttggacttcgtgcgcaggagctgtggttgttagtattactgtcgctcctgcggtgagagcgtatgaacaggaagttaggtgcccacgggttggagtatggaccgcttggatgacaatgccaggaagggcggttggagccctgggaggatccccaagtgtccctcgggctggggattgctctgaatgtcttcgggccttcggggtatatgggagaatgggggcagctgggagggccaggggggtttcttggaatgagagttataggtagggagaaggcagtggagaaggatgtggtctctgaccccaaggcctgcagctgcacctgccatgcctctgggcctcccagaaggggcagctccacatacttcttctgcctccctttgtcctaggggtgacaagtggggcctggacccagccagctgggctggtggtcacagtgcggggcccccacaggccctttggtggatgttggattccactgggcagcttggcttgtgacctgggctgaccaggacacagagcacacagggctccaggtccgggtcactttcccaaccagaaacaccgtcacccaaaataagtgacagttgtaaaatacatcatatgtaaattcacgtacttaaaaaaatcataaaacaaacgcctgcccacttagaagcctagcttatgaaatagaggactttctatgcccatgagcctctgtgacccccagcttctgcctgagagagcaccattctctttgaatcttgtgtgaagtgtacgccacatgtattggcattcttaaacacggcatcatttagtttgactgatttttcaacttttggtaaacagaatagttctggatgtagttttaaaaattcggcgttgtgccaggcgcaggggctcatgcctgtaatcctagcactttgggaggccaaggtgggtggatcacgaggtcaggagtccgagaccagcctggccaacatagtgaaaccctgtctctactaaaaatacaaaaattagtcgggtgtggtggcgggtgcctgtagtcccagctagtcaggaggctgaggcaggagaatcgcttgaacccgggaggtggaggttgcagtgagccaagaccacaccattgcactgcagcctgggcgacagagtgagactccatctcaaaaaaaaaaaaaaataaaaaactaaaaattcagcgttgtgtttctggattcacgcacgttgatagtcgtggccatagtgcacacctttccatggctcttggtatttcattacatgaatgtgctgcaggtgtattcttctggtgatgaacatttgggttatttcctcctttttctaaacaacacttctgtaaacattctcgtataagtcttctggtgtacatgtggaggcgtttctttaggacagtgcttctggaagtatctgtggtggaggaccatcttttaagttttcagttctcagaggtggtcctgctgcatgtgactagtacacggttgagagcacacgtgactcgcctgacgagctcagctgtacctgagtgagtcagctgatggtgtgctgggatgttctggcaatgtcagattgctataaacgtttctaagcgtgggccgggcgcggtggctcacgcctgtaatcccagcactttgggaggccgaggcgggcggatcacgaggtcaggagatcgagaccatcctggctaacacggtgaaaccccgtctctactaaaaatacaaaaaattagccgggcgcggtggtgggcgcctgtagtcccagctactcgggaggctgaggcaggagaatggcatgaaccctggaggcagagcttgcagtgagccaagattgtgccactgcactccagcctgggcgacagagtgagactctgtcccaaaaaaaaaaaaaaaaaaaaaaaaaaaattagccgggtgtggtggcgggtgcctgtagtcccaactacttgggaggctgaggcaggagaatggcatcaacccaggaggccgagcttgcagtagccgagatcgcgcactgcactccagcctgggcaacagagcaagactccgtctcaaaaaaaaaaaaaagaaaaaaaagtttctaagcatgaagcagttccatggaccacaccttgaggagcactgctctgggtatataggagtgtaatggcaccgtggagcttcaggatatgtacctgccacctttcctagataatgccagattgttttccagtgaggatgtatcagtggacattcccaccagtggagagtcaatggggaatggtttttggcattctccagtacagtggatgtaaaatgctatattataatggttttaatttgcatttctttgatcactagtggacatcttttcatatgttccttagccattctttcatcttctgtgaatgcatgtttgtcttttgttcattttttattgagttgcgttttttctaacaatttttaggagttttatttatgttttgaatactaatgtgttaattaaatgtattgcaaacagtatgtagcttccagtttatagtttgtcttttcactttcttcatggggtctcttggtaaacagaaattctttattgtaatgtagtcaaattttcagcctcttctttgttagactgtactttttatgtatttaagaaatacatgctatctcatggatgtctttttttttttttttttccttttgaggcagggtctcactcctgtcagccaggctggagtgcagtggcacaatcatggctcactgcagccttgacttctctaggctcaagtgatccttccataccagcctcctgagtagctcaaactataggcacgtgctaccaagcctggctaatttttgtattttttgtaaaggtagggtttccctatgttgtccaggctggtctcaacctcctgggctcaagcaatccttctgcctcggccttccaaagtgctgggattacagacgtgagccacggcgccctgcttcagctttacagcctggtagtaagacagtgcttgtcgcaacataatcagtgcctgtgaattgttgaatgaatgagtaagtgactgaagatgagttcctggactgatttctggaagcttttctttttatatttaagtccttagtatatttggaatttatatttgtatataagatagggctctgatttttcctccatagctccattgattaactagtccacctttccccacagacctgtaccgccacctgtgtttctgtgtatgcctgggtcttttccactggactgtttgtctatcctgatgccgcactgtcttcattactacaactttataataagtctcaatatctggtagggcaaatcctttcctcttacgctttttcaagagtatttttgctgttcttggccctttgttcttttgcatacatttcagaattagtttgtcttgtttcaccaaaaatcagtcagccagcctcttcccccaaacccttttgatattttggttgacctttcattgaattcattcatcatcttagggaaaattgctgtcttttttttttttttttatccaaaatgtgtttattgagatggtttcccactcatcttgactcagagtgcttttagtgctgcttcctcctgaaggaacatccttctgtaagccttgcttttcctcctgtaggctggcagaggacagtggagcagccaacacacaaaactactgtttgtgcatggctaaagaccgtggtgattttatagcatcctgggcatttcacatccatgaagtaggaattggggctctgcaccaggcgtttcttcttgtgtttcctcttctcctcttctggagagggatgaaggagatcctttgcgagaggcatgttctcgtgtgcgtaggtcgtcaccaccggaaagcaaaattgctgtctttgtatttctttcttttattttttgagatataatctttctccgtcacccaggctggagtgcagtggcatgatctcagctcatcggaacctctgcctcccaggttcaagcaattcttatgcctcagcctcccgagtagctgggattacaggtgtgtgccaccatgcctggctaatttttgtatttttagtagagatggggcttcgctatgttgcccaggctggtctcgaacttctgacctcgtgatctgccagcctcggcctcccaaagtgctgggattacaggcgtgagccaccatgaccggcttatctttatatttctattcatgaatatgaatagtattctacttatctatttctattcatgaacatggtatatttcaccatacattaggtcttctttaatgtttttctgtaaagtttcatgaaggttttatacatcttatgttatatagagacttctttttatatattttttaaatttttaaattttttgtagaaacagggtctccctgtgttgtccaggctggtcttgaactcctggccttaagcaatcctgccttggcttccaaagtgctgcgattacaggtgtgagccactgcatctagcctagagacttctgatcttccatgctttgccaccctcccccagggttcagctgagctcttgtgcacacgcactgcagacctgatgagggaatggggcacccagaggtgagaggatggaggagcccgctagccagctagtcttctagtgggtgcaggtcaggggtgagcaccaggtatggtgctcagtgctcttgcctagcaaggggggcctagtgtctgtgttcatgtcccgcacctgccatctgtcttctgatcagaacagggtttgtagaggaggcaggctctccagggactatgagaagggtgaaaaggagagggctcgaggatctggaggatggaagatgtacaacgtgggaggatgcctatccggtgaagggattgtggacaagcagagggagtggggagggtggagaaggagaaggcaggaaaaacatggtgatattggaagccagagaaaggggctaatgcaaagggtgtcaaacagatctgtggagcgctaggaattgcttgggtacagcggtgtgctggttgcagaagaccccttttagcaatggcactttggatcatgcggggaagggcattaaagaacgccaggtggaggaaggtctggaggacatgggactgtggctgggcgggcaacctggggagtctgtctgcaggggtctctaagcaaacggcagttgctggcggtgaggatcctgtgccttctgttctctgtacagtgagggcgggtgtgttctgaagcctcactctgccccctgccctctcaaggggggcttcccccgcttgttggcaagagctcattggacccaaatcagagcgacagcttgtcaggccgataagcctgggctctgggcaggagctctttatgtctgagccatttaggacactcatcgtgaccagtccctggggctcagaggcctggttggggaggaggttcagggaccctcaggagagagcaagggtggagggaggaatgctgatgtggtactgagtgcacgaggtgctcactttgttcccatttatggcagctaaagagagctgcagcgaagcccccctcccccttccagccccccttcacctgtccctttctcagcctgcctgctgggaggaggggagtctgaaaagtgcatatttcacaaaagccactccgtagagggctgtgggtcttactcaggagctgtgggaggaatattgacaagattctctgcattgccgattagctttctgtcttcccacctaaatggagacttctcacaacttggggcagggaggggctgggctgggtggccacccaaacagcctgcgggatcctggggtgcctggccatgcatcctgcatttcctccccactcctacaaatgcaggtgtgcagctcttcttggaagatgcatgccagttaactctcgcttgtatctgggatcaaagtggcagagtggaaaagagcagggagttgatcccagagacctgggttctagtccccggcatgcttgctaactagccgtgtgatcctgggcaaactgcttctgtctctgggcctcagtttccacatctggaaaatgatagacttggaccagctcatctctgaggtctctctgggccctgacattctgtggttgtatatgtttcttttgttccctttgtcttttttaaggagctgatgattattgagatattttatcttccttatcctcatagtagcgtcggtagagtgatggaccacggatgagtttcttctgtctcataggtggtgacactgaaaggggactgcctcacctggactacgtgtgtgctcagtgtgctggaactcactgcctggacaaagctgccctagattttgccattcctggagctcacaggcctggagtgagcggctgcctgccgcggggctgggtcgggacaggagcgctgggttccagggtggacgaactcctgttggatttgcctcttcggacctccagttccttgcttagtggtggggggagaatcttccctgttagcccatttcccacttcagggtagcaagaaatggaagtcgtttctgggcctgggcaggagatggggccacagccacagcagtcagttgatttgaacacgccctcccccctgcaggggagggccttcacgccctctaagcaggtaatgagggggcgggctgccgtattaagcaccctggctacgctggggagaagctctgcaccttgtttgacacacagaactgtcgcggctccttcctattgttagaagccttaattactattgttccaattcctccctccagcgatcgtcattaggaagagcgttcttgtttcttcctccttccccccatccccctgaacacgtcttcagggctgttccctggcgctgcctgcctctcacccggctctaccctgttcactgtgcccttctacccagggcagcccctgacagcccacctcccttatcccctggccctggcctgcgctcccacctgctacctctttaggaaacaaacacatacccttcccacccccatccccaagtctccccattaaaactcatggctcaaagccagggatgctttaccttgtgtgtggattcaagaacctgtcctacccgcttctctggtggttgtgagaatccaaaccaagagaagggtggtgccttaaactggaaagtactgcacacatttagggggtgtccgtgcaccagcgccgcaggccatagctggctgggggaaggcttgggctaccctgctgctctgccattgactccctgggaggatctttgacttcagcttctcctcggtaaggtgggaatcaaatcttaatcaaacttgcctggccaacctgggagccttgtcagtgggctgcaatgggatggtgatcctgaaagtactctgaggcctaggaagggttctgctgattggaatcaggatcgccagcttatttttcttttcatgacttcctgttgttctctgtatctatttccatcccatctctcagccttcctagagggccctaaagctgtgcaatgatttgttccctggggaatttctccaccaggcagccccaagtcatgttgctggctcctgcagttgcctgctgaggcaccccagcgtctgacacctggggaaccccacttgtgggctgtctgggaagtgtgggggtgggaggggcccctcatttccctccagctgccatttgctgctctctccaggctccgtggtgggcccggcacagcctgtatcggagtggagaacgtaggttggtccagagcacgttccaccgggacctctccgtctggagcctgtatcagagtggagaacgtaggttggtccagagcacgttccaccgggacctctctgtctggcttgctcaggctcatttcttctgtctggggacttacggggatgagcatgaaaacctgtgcatcctggaatcacagggacacggctccatgttcccagcggttgatccattatccctggtcgccctgcttccttctcagtcgctctggcctctgctccctcctggagtcctgggctgggaagtaacctcagtccatgctcagagccaccccatccccaccccacccccaccccagccctggggccctctgggagctggggagtctgtgctgtgattggcaggagttggacagatttgcttgcttgggctatctgcctgtggggctctcagctggatcatcctgcgactactgactaagcagccagatggcttttgctgggaccttccagatgtgggagtaggttttggaggtgctcattcgtgcccacatggccctgggtccacatctcttttgctcccccgagatgtccaagctcacactgggcactcgctggtcagagtggttggggttctggaggcggggcttgggaggatatggggagcttctccagcatcaagcctcccttttaccaggattttcgtaccgtctcaaagcacccaaagctcttctcaaacacatctcgtcagtggggaggcttatacagagagggagatggggtgcctggtgtccaggtcccactgggcacagggcctgcagggctgaggtggaacccactggaacccggagtggccctaatgggcctggaagcccgtttgtcacaggtgtggtccggaggtggttctggcttccagattcagccatgtggatcccctaaggggtcacctgctgcctttctctgcttcccaaaaacgtccacgtgggcttttttctctgcaggcaccctagggaggtggaacctccttggccaaggccctcatctctagccttcagacacagatccccaaggcccctgctttggagggctctgagggctccctgggtcctggtgaaggtccaggccaggccaccaccccaagggcccactgtcctgggggaagctgagcctcctgagtaggcccctgaactgcagttggaggaagggctggagaggagatgagaagtggcagactggctgagagactgctcagagggcagcctgttgcccggctgtttaatttactggagttatttttcctcatcgttccctttctttggtgttcccaggctgctattcgtggctctttccctgctgagctctcttcacgtcactgtatttaggagataactgaggagctgagccttccacctgcccctgggcctcatgcccggaccttggatgccaggggctgaggtgtagcatcctggggtccctgatggcaatgtcccctgagttggctggggttgggcttagatcttgcactctacgtgaccggcaagggaggtggtcagagacaccctcagcttctctgacatctgtctagctatggaagtgtcatctggaaagatcctgcccagtgttgctgggaatgagccatcctgcccagtgttgctgggaatgagccactccttctcttctgtcatgctgggtctgtgatgtccagaggccccgtgtcattgaggcagcggtgagggccctgtttgggcttgttcttggagaggaggaagttgagtcaccccagaccatattactccctttcactttccccagggaattcagagacttttccctttgggagggggagaagatgaccagaacccgcagggactcaactcccctggcttcagctgtctgctgcctgcatcccttcaccccttcaccccttcaccccagcatctgatcatctgtcccttccctgcttccaggccttctctagcctggtctggaaagtgagacgtaatatggggaagacagcacgtgctctagggatgggtgagcttgcttctcggtgtcaccacttcctgtgtgtacagtacagagcaaggtgcttaacttttagaaccttgaccttctcatctataaaatgggttgatgatgagactactttctagatgggttcaaggagcaactgaaacactgtatgaagaggtttcaggtcattgtgtggtgtgtggcgggtgtgttggggccagctgagttttgcatgggataatgataccctctggggtggcatagccatgctccttggcaggacaatatgggatgtgtacagattttgggtgtgcatgcctgcgtcctgtgctcagcccccattttttctgtgggccctggttttctctaggctttgttttggctttctcttcagcagaatgaggtgttctgtgtctcccaccaaccccaacttcctcggggcagggagcaaaggacagatggggagtgagctcacagctctgagtgctttgagatcacagctgaggtcagggaggaaagaggaggaggcgtgttctctgcttttaggatgctcccttgagactgcatgtttaaactagatttgaaacctcttactgagctctcaaaaggactgccaggaggagacctttggggcctgcagtggccagactagctagggatctggttggggctatgatggccaggacttctcacctggccttctcaggcaagcctgggtgggccaggggtgatggcggtaggagcgggcctggctgccttcctgagggccttggcagagatggagtaaaagataaaagtaggacctgggaatggggaggaggagaggaaaaacgcaaaggggaaaggaaggagaaggcaccaggaaggctagctactctagcactgggggctgagcccgcttggctgggtgcctcgggccgcctcccttcctctctgcagtgattaagacatcaccagctgcctgtgttcttagccccgctggctctccgctgccaataacaaatgcatctggctggaatctgggtcattaaaaaaaacaacctgatatttctctttttcctttaccccccggcaatccatcctctggaatatagctggagccccccaaagagaggtcagaggtcgcagaaaaccatggtggacatgtcagctgtcagggccactcaggcagccagccagccactcttgctggatgtctgttttctgttgtgtctgagttgttgtgaagtgaaggccccaaatacagagcgatgtgccagagacaagggcttacaggtggcccttcccacccgtgggcggccgggggaggccggacggtgtagtggctgtgatgggggctgtgtgtgtaagctcggagttggacagccttgggtgtcagtcactgttgcctgtgtgatctagcaagaatgttcgacctctctagactcagttttgtttctttttgtgaacaatgacagtgacatgcaacctgccctgtgcggttgttgagtgggatgcacagggactgtcctagcacaacactcaaggaagggtggccactgccttagtttgtcaccatcattatcctatctctgttgagtggcacctcctgcgggagctgtgtttgctcagccgcagtaccgacccccatctcccggtgtgggtcgggcacctgtccaaggcggaccttctgtgaggatggagggagggcgccttcacctcctgcctcaggagccaagagtcagccagacaggcagctctctcaaatggagatcctttgaagactataaagatttgtttgtacatctttctctgggatttgagaatatagatgagtagagaaaaatggagggaaggtggaagggatgacttaaaaagggaatgatagggaggggaacatcacacaccctggggcctgtcggggggtgaggagctaggggagggatagcattaggagaaatacctaatgtagatgatgggtgtagcaaaccaccatggcacatgtataccaatgtaacaaacctgcacattctgcacatgtgtcccagaacttaaactattaaaaaaaaaaaaaaaaaggaatgaggctgggtgctgtggcccacgccggtaatcccagcactttggaaggctgcggcgggcggatcacctgaggtcaggagttcgagactagcctggccaacgtggtgaaaccctgtctctactaaaaatacaaaaagtagtggcgcatgcttgtagtcccagctgcttggaaggctaaggcaggagaattgcttgaacccgggaggcggaagttgcagtgagccgagatcacgccattgcactccagcctgggtgacaagagcgaaactctgtctcaaaaaaaaaaaaaaggaatgaatctaggaagtttcttcaaagagaccttactagtagttacctgtaacagctaccatttctgaagctgacaccgtgctgtgccgtggcccaggctctgaacctgtgctaccttatgtctgactgattccaaagacttccgtgctcttaaccactattttgccctttactgtcccaggctggtaacagaccgaggtgtctcactgggagtaaagcaccctcagggttaggcgtgggtctagggtgcatgggtgggcaccccagaggctgaccgtcaccttcctgactctccagcggtgcctgcatagtctgcggcacagcatagctcacaaatattggccgagatgcttctttggagcaggcagaggtgaagcttcgtcgattctgctgcacccgggccattggctgggaggtggaggcatgggagaggtctgcagaggaatccgatgttgatatgttttcctgggacccactggaggacccaagcccggaggcttagtcctgctgccctggcctgtgggggatgttactggtgtgctgggccggggctgtctcaagataatatgagacctgtttcctgtgctgccggggaagagtgcaccacaccgcccagcacagagggctctcggtgggaaggcgggcccaaggagggctgtcatttctgggttcttccgttcagaggacagggcccttcctatcttagaccttggatgaggaacacattggcctttccctgtgaggtggttcctgactctggggccatccttcatccgttgctcttttccaaagatgcagagagatatttccagtctccttttatggctcggtgactggagagccctggagactcagcatcaggctgaacttttgcaagcctgctggctgttggtacggggaggaggggagagaagccacagggaccgggagactgggtcgccaccctcagcaggtggccaagactttccaggctgtcctgactgggcagtcctcttgttgggaccacactctaggttttgcacccatcctttactggtcccttcccttattcatttattcattcaaatatctgcttatactgggaaagacaaaagcaaggatgaaacagtctttgccttgtcatggctagactgtgcaacatattacaacagtttattttccattgaagataagttattttttatttaaaatatttttctcttttttttttttttttagatgaagtctcattcttgtcgcccaggctggagtgcaatggtgtgaatttggcttattgcaatctctgccccccaggttcaagtgattctcctgcctcagcctcccaagcagctgggattacaggtgcatgccaccaagcccgtctaatttttgtagttttagtagagacagagtttcaccatgttggccaggctggtcttgaactcctgacctcaggtgatccacctgccttggcctcccaaagtgctgggattataggcgtgagccaccgtgctcagcctaacaaattttttttgagatagggtctcactctgtcacccaggctggaatccagtggcataatcacagctcactgcaaccttgaactcctgggctcaagtgatactcctgcctcagtctcctaagtagctgggactacaggcatgtaccaccacgcccagtgaatttttaaattttttgtagagatagggtctccctgtgttgcttaggctggtctcaagtaatcctcctgccttggccttccaaagtgctaggatgattggtataagccaccgtgcccagcctaaagagaagttttaaagatacctgagcacctaattacagctttcctttcgatgttgtaaaccatgttgtttaaggaacacgggacaagagtgtattggaaagaaagcggccagctaccttaggtgctctgttatgaatgtatttccttagacccacacagggttctctaactgtcttttcctgaaaattcttccaataagcatttattgaacttttactatgctcaaggcacagggcttggtcctgctggcatgcagaagggggggacgtggccacagctgccctgggaagaggggggcatgtggaggggatccccatttcctatacacagggccctggctccgtcacagatgaggcctggttggtcttgggtccataacttgtactttcagagtcaggaagcagatgctggcaggcttggaaacctcgtccaggttggacggtggtggtagcagagggatgagcagcaagtgcttcctgggcatttatcagcacacgtctccaggcgtaagaccttctgtctgccaggctaatgggccacccctggcaccccatggcactgcatctggatggatttacaggggtcttggctctcagcctcatctctgttccttaaacccggctgcctctctggatgctgcccagaggtgacgctgatcagattgtgtggggaagcctgtgtgatggatggctcattttgtgtcctgggtctgcagcccacattcctgccaagagcatacctgatgcagggccctttctgcagtggtcctcaagaaatattaactggtaatgaggaccagagactgaggttcacccgtgctggcttcttcaggtccttgttctaccatgactaatagccctctccttaaaccaccccccaggtcccaccctgggatgaaagaccagctgaccctgatcctcacagcaggtttgtcctatggcggagatcccgagggggccctaagtcacagctttggccatccagacccggggagccatcactggaaagtgcctatcaggctaaggcagaggggtggggtgtgggcgggctgtgccagcccaccgggcaggtgagggacctgcaggagccgagtgcctgagctgtcctcccctgtctattaactccccattagcatgcatcagtgccgttgcctctatcagtttgatttatgccactgcggttttgcttacaaattagaagccgctattgtgctaggtcggctttaaaatcgatgcagagtaattgcagtacatgggtagttggatgacattaacatgagaaatgtgctgtagtcgtcatccttggaacaaacacgtccaattacagtgaaattctgtgccccttacccggctaatttgaacacagctcaccgccaaggcctcctccagcatggccagccctgggcagagatcgtcacgaatggatttgacgggaatggggctggggactgtcatgttgaagcccggtggagatgtgggacagggacctcgtttgttccagagcctgttccaaccctccctggcttttgtggcatgttttctatgccgtttgctgcaaggatgcgttgggcatggagtaacagccccaagaccgtcctgcagtactgcacgtgtgcgtgtctgtgctttggtttgtctgtgtgtctaccttgttttagagtaaaaaagtgaatctgaggccagatcatcagtctgcacctgcctctccagcagtccctgcatttcctcacctataaaatgggaaggggaacactccttatggagctggttcaagtattgagcgagagaccgggactacaagtgttttctaacacaggggcatgaattcagccgtggcggcggcagcttgttaggagagcgatcagcctaggggctgatggggtggccaggcgtcgggatggcatccagtcttctctgtctgcatgctggagtcatgtgagagatttataacagaatagggatgctgggttccatctcctgaaattctgtgtcattggtctgaggagtgtcctgggcatctggacacgggaaagctccccagcagggtctcctgtgcagccaaggttgaagctgcttcctagtccatttcttgctcttcagatggatttgtgcttctttaggtaggactcatcctagtaaaaaaaaaaattttttttctgaattgataagcaggaagttcctccttccatcaagtcagaatccttaccgcctcagacatagcctactccttcttttgttagctgagacatgggtaggtggcccttccatctctctgtgtagtaggtgtcaggcagcatctggtttcccttgggacccttgtgcacttacagatgggaccgggaggctgtggatgaccgagggtggtgctgctctgctggacactgtgctaggcgccctcacgggctggtgaagtggagtaagagcccttggagatctgtggagcgtcagagaggggagagcagaatgcagcgagtctggccctccctttttcacacacgaggaagctaggaagaacctacagaaggaaaggagcttggctgggaaatgccagtgagctgggggcagaggcggaatcaggacccaggcctggctcccgttcagggttgttttccatgctggggcagcccagctgggagaagcgacccctggaccgtgtatctggggaagctgtgcccagaggggcaggatccgcgtggttgatgccgagcagcctgggatctccgatgaggcctagcgtctgctcatacccagatgcacgtactgcgccagggtggccgcgtgatgggcgggggtaatgacagctgtcgggtctggtttgacgtcagcacgggccccctgacagatttcccggttctgtcagcttcgcttcagcagtgctcttcctgtctggtaaaagcagatttgtgtgagatcggccctcttgaggggcttgtggggggctgctgcagggaacagagctgtggtcaggattacagggcggccacgctcccatggctcatcccgatggggcagccagagcttcagaattcattcagaggttcatccagccactccactgtgtgtgcagctggtggtgggcacctttgcggtgcacaggatcccatagcccatgcggtcaaagagctgccattctctttgacagtggaacagagacaaagaatcaatcatcctcgcaccctgtggtccgagctgggttggaggtaaacacaggaagccgtaagggcacccaggaggggcccccagcctccagttgggggaccgtgggaaggctttcatccgacccacagcgcacagaggtgaatgatttcaggcgaggcctggctttttctcctggtgtctctgtacccttagcacccgccactccccagcctgcccagggggcctggaggactgcctctcacatgtgcacgcacaggacagcctgtcctgtgcggtggcggtcacagcattttctctacctttcttgaaagtgaggcctgcagagactgaaggcgcttggagggaaggttgtcacactcacggtggggagtgacagcttctgggcagaacaggagtcatgcacgtgcagaagcgctggtctgggggcagttttcaggcagctgccaaccaagcctgatgcctgtgggatgggggaccgttgttgcatcctcgtgggaagatgagcaatgtacccctgcacagtgcctgactcatgcttggttccggagcttaagaaagtgggcagacggccccccgccctccacaataacaggaagccaggggccgagtaattgccttaagcctggggaagcagaagggattttttttttttcaaataggtttcgtatatcagagggtcttgtgactagggcccatctttacccgtgggccaccaggctgagagaggtggactccctagagaggtggacaggttcattctcagctggaagaacaaagccatgccagaaggacccagagggacggtccatgtgcacacattctacctgctgggccaagctgggagccagctggggaccattttttctttccttctgaagtcacagtaaaccacacagggcctgttgatactctgagcctgactcagggagaggggtcagagttgtggttctgctgtctctcctgccgaagtctgtagggagaggtgacattagaggggagactgggggaaaggaggggacaggattgctctggctgagtgcagagggaggagatggggtgtgatggggtgaggggaggacggtcgtgaggggctggtagagttaggaaggcagacattttttatcctctagttgcacatagcgggagaaactcctttaaagaccagagaagataacctgccattcttggtctttgtgcttggaaaggagtattctcaatttgttcacaagttcaaggggacgagcctgggtattagggaatgatccgctcttgaaaggtcagattcacatccaagaagccttaggagggcttactcctgaatcctctggccgtgagcattcttaaggggccatgtaatcttttttccctccttctgggtaaaatgctgactgctgatttcttagggatggagggtcctaagcctctgtaggtgtgcttggatttgagggtgtatatatatggctgaggcagaaggattgcttgagcccaggagtttgaggccagcctaggcaacataacaagaccccatctcttaaaaaaattttatatatatgtgtgtgtgtgtgtgtgtgtgtgtgtgtgtgtgtgtgtgtgtgtgtgtgtgtgtatgtgtatgtatgtgtgtgtgtgtgtgtgtgtgtgtgtatatatatatatatatatatatatatatatatatatatatatatatatatttttttttttttttccctcttcgaactcctgggctcaagcagtcctcctgccttagcctgtcaagcagctgggacaacaggcatacaccactgtgcctggcttctcctaatatgtggtctgaatccttcccaagaagcccgaagggtttccaacagtatccttgatggtagagagaggccaggttatcctcccattggttagtgagatactgagtgcagagagggagacctgacacttacctgcatgtctgggtggctgaggctggaactgaatcctcgtccctgggcctctgcctgtacctacactgcactctgtactgtgttgtatctggccctctgtatgctggcagtaaacaccacagtgggcaaatccaaatgattgtttagtggtaaaaaattaaatgcaagagctgaagccaacagcagtttcattgaacacagggagactaagagccccagagcagcatcagaagtcatcggctgtacatgtgtcctgggctgaatgtgtccaccagggctgcgcagcctgggccattttgccctgctgggggcaggctttggagagcagctttaaccctctgacaagggctggcttctgacagctctagggcagcccatcatggcctgtgcttcctggccctctgagacactaaggtcagacgcctgaagggacaaagctgtttttagtggggagactccccgtggagggtgaaatttgcattgcgtgcttggagagtggcaagttaatgcttcctggcagcaccaggaagccgcaggtacctgtggacaggaaaatgggtcatgagggagtgtttgtgtggcaggcaggcttgcgtgccaggcccggccccagcctccccttctcacacggactcacactccatctccactggcctctggctcttccagtcgggccacgtcctctccatgtgaggcaggggacttaggtgtgctcacttgcagctgggacttggtgtccatgggaggcttgaagacaggaggaagccggttggcaggccccagggagggctggtcctgctcgggtaggctggggtggtacaggtttgacttctgccgaggttataataatgatctaacgatgactggtgttcatggggtgctttctggctcagaaaacgccttcatatacgtctctcatttggtccttgtggtccttttcaaggaaataagaaaggcagctaaaattcattgagcaattactatgtaccaggcactatgctaaatgctttgtctgtattaaaaaaatccttggccggatgtgggggctcatgtctgtaatcccatcactttggaaggccgagatgggaggactgcttgaggctaggagtttgagaccagcctgggcaacatcacaagacctcaactctacaaaaaaatatagaaaaattagccaaatgtggtggcatgcacctgtggcatgcacctgtaatctcagctacttggggggctgaggctggaggatcacttgagcccgggagatcgaggctgcagtaagctgtgattgcaccactgcgctccagcctgaacaacagagccagaccctctctcttaaaaaagaaataaataagctctcctcacatcctgcttttcagtccccatttcacgcatgaggatactaaatctcagaggtgttgggggaccagtcacacaagcactagggggaagatccaggactagcttaggcaatcatttctgaggctttgctcatgccctccccaccccatggggtggatgaaaaaggccccactattggcaggcaggcctagaagtgagtgctcctagctctagtgctgagccctgtgctgcctggctgcagagcagcgccccgttctcctttcagtctcagcgtgagttgatgttggtacagttgatgttgctgggaggtatcttggcacagctcccttccagggtgtgtcggttttctggggctgctgtaacaaattaccatacacttggtggctgaaaacaacagaagtctattatgtcaccattctggaggccagatgtctgaaattgaagtgttgcagggccatgctcccttcgaaggctctagggaagaatccttccttgcctctcccagcttctggaggctgccagcattccttggcttgtggctgcatcactgcaatccctcatctcctcctcctctgtatacctccctttgcctctctctcataaggatgttcctgttggcatttagccctcccaggtcatccaggatgatctccttatttcaagatccttcatataatcacatctgcaaagaccctcttccaaataaggtcacattcacaggttccagggattaggacatgaagttatctttggagccaccattcaacccatggcatagagcatccccagctactgtgggcacaggggacaggggttggggggttggtcccatttcgggcccagagagttgtgggggccacaaatctgtaccagcctcctaccaaggggcagcaaatagaatcaagaagatgaatccctgccttgggtctcaacctcattggtctcgtggcctggccttcgaggtgcctttgactgtgaacctgcactgggtatgtggccctcactctgccttctttccttccatccgtcctcatttcactcttgtgtggcttcctaattatcttgctcccagcaaatcccatgtattctctctcccttgtcgtcccaggatcagaggctttccccttgcctctggcctggccgccttctgcagcatccctgtctggggcttactggcaagtagctttcaccaggacctatccgtgtatttgagggctgtggccaaactgaaggccctagattcagggctggctgggggtagaggatgcctcaaagatagggctgtgtgccatcttcctgctgggttttgctgaacccagagtgagaggaagaaggcctgcagcggttcatcgcacctgccaggcacagctggggctgacacagctggggctgaatgcaaatgaagccccttccagccatctctctgcccagcagccttctctctggcaggcaggcatggttgcaccagcttccgttgcatagacatctcagggaccctgctgctgtgtgggaagccagagtccgacctggctcccctgggctggatacatttgcctcttaagccctgggttggagagaatccagggctgggtccccatcaagagacaagagcacaacggagcagtgtgtagatacttttctttttctttgtttattcccccttcctttcttctcctcccatcatctgtctgggacttctctccacgaagcagaaaacctactagctggttgtgtcctgcatcactctatggaggcgtccccatcactggtctctccccaggattgcccagagcctatgggggactctgggtggagatgcttggaaggccggtgccggttataggcatcacacgttgtccaggaggatgaatgcttttgaaggtcagcaggacccaagtttagtttccaggacttcctggtgttcagctggaagagtggatgaaaagacaggtcttcctgaggcatagtctcacagccaggcttccccctcccttgtgagcctgactcccctgcctgcatctcaccgtctcctttttccctgcctgccttcaccccaccaccaagaaggtagtgttttctattgtagggtggcgcccatagggacttttctttcatgtcctggaactgaacgtccctagaaaacagtaagtcatttgcttctgcaagcgtaggtgcccacggagcgctcttcaacacttcggagtgtggtcttctaaagtgggggtggcaaggtttcctcagcccctggagaccctgcctcatacccaggggttttccccacactgctctgggaactgaggggtaagagtccatgccggcctgtcccaccagctgccctcagttatctccttccatcggcagcacacccccgttctcatccacatgcagcccctgctccgatcctcagttcccccgaggagatatcaagttgttggaaggctcacctgtcctcggcccccctggagacccctgcaggactccctggggcctccttgatccccatctggaggcccccattcagtaggatctcagtgcgtaccttcctgcctggaggtgcggagatagggttgggagctgggggcgggggtgtatgctataaagggcccagcgtgacctacataaaccttctgcctgggaagtgaaggatgcctttaattgggaacggtgcttagtcgagagagtgcttgcctgggtgtgtaaggattgtggttttttaaaaataattttaatttctcgccagagaatgccatacattctttctttctaccctgtggagtctcttatcgccgcagaaagcaacagaacagcaggtgcagaaatgagagaggcaggggagaatgaagggaagcggggcagtcccaagttccctaactctgtgaccttgggccaggcactgcccctttttgggcctcagaattcctgtcagttcacttgagccctaggatacctctaggcagaaaattctggtcctgctgtcaccactgaagacatcaaacatgctctgagatggggagtcagcgaagacagcactccaggctggacctggccccagcccgaacagtcctgcatcagccccgcgtcactacggagagatgccgtcggcagagactgagagggagctagtcagatccagccatcccagcctgaccatcccatgccccatgccagcccaccctaaagaggtcaacctcaaggggcagaggactgagccagcaggggcggggtgggtggaaattcacatggaattggccagtccccatgccagggcaacagatgttcgctttggagcctggatggggttcgctccaggttgtgggcgggcggcgccttcagatgatctcccggctcgggttacttgttggctctgggcagggcctttcactttgggggctgtctggcctccaggattcctcccacctctgccttttcacccgctgtcgcgtgcatgcccagccagcagagctggccaccttgctcctgacgctctgagctccctgtgcctgggcctggctctcagtggggctgtctcaggccagggcagcgtctcccctctccctggaagtaccctgcttatcctgattgcagcagtacggttatttgtgcccttggagggattaagagtctgtagggccttcaccacgggcctcttccagaggtcccttctgtctggttaggaactgcagtcctggatttttctttttggtatgattcttatgggcctgaggatggcaaactttggaatttaagtgggcatagaattcccagctaccaaggtgcccttatgaccaagtacccgttcctcctatatggtaaatcctgagaaatgtgtatagttttctcttaaaaatatctcctctcttgatcgctggcttctgttatgttttttttttttcctacagtgagatatgtttatttttaagaatgcttccaataaccagaggatatgaaaccagtttaattttttaccccactaagagataaggaggagtcagagggagggatatggacacagcaagaaggatttgggtgggatcatcagggtaactgaggaccaaaagcccatcccctgccctgatgctttccgtctcctgccttctgctccctgcaattggtccatggaactttgaactaaaagaaaacttagaggacattaaatcgggtggttttgaggccagctttgcatcggaatcacctgggaaggttgcagaactatagacttgcagttcctacctctagcgactgagtttgttggtcaggagtggagactgggctgtttgtttaacaaggtcccccagtgatgctggcgcatccagccctccctgtccttggagtgggatttggtgcatgggtctggcgcagccctggctctcccgttcctcagacacaggaagcgcagctccagccactctcagtgggcacctgcaggtgtacgttccctgcctccagaggctgctcactccatttggggaagttttagccataggaagttttcttgctgggcctggatctgtttttcagagccacacagaaagattttcctttccctacttggggtctggccttctcacaggaggacagctgtcccacctgtccagtcttgtcacctctgtctacatactctctattccttctcaggcttttcaggtgcctttgctgatcacaggtgtggggaggaaagccacccaggaatggggacagagaacttgagactttgctggctaggtcaaaccgattttttccctccagggccacctgtcgtctcattcctttctgtctcttttggtagcttcagcttgaagctaccaaagcttgaattctcaagcttccaggattatgtaaattagtaaggttacaagcatgtaaaattattaagtggtatttgataaatacaaaagaatacatgtaagttacaaagttgtaagaaacactgtggaatccaccacctagctgaatgtggattgtcacaacacatcacctctagccctgctccgtccctgtcccatcccctggcggagggcacccttctcctgagggcatttttatcagccttttgcctttttatgtaatgttgcccctcagatgtttccctaaacgatgcattctatagttgcatgtgcttctgagctgtgtaaaatggtattgtgctacatgtagctttctgtagcttgcattgcttctactaaatattgtgtttctaagattcatccatgtaatgtttgtacttgtagttcattcattttccctgctttttaatatttcattgtgtgttcattgttaccagttttttgctgtcacgagcaaagctgctgtgagcatctttgactgtgtacatttctttcatgcacatgaataatagttcctctatggcatacactggtgaaatcctgcatcacggggcaaggagttttcctcttttgagaaatgcatcagatctcaaagaaaagagcagtcctgttggcaggggttgtgggctatagaggtgtgtctgtcctagcctgagtagcagccaggtctctgcagggaatatttcccaagctgagtagcaagagccaggttccttccagcactcccatctcggagcccccacaggctgcagagaatagcagagttactttacacagagcggggatgaatggagcttgtgtaaacgtgggtgtgtagggctgagacgtcctcgaagatctaatttactgccctgctttcccatcctggaacctctgccaagtgcctataaaaaagatgaaatatttagccaagatcagggaaggaagaatcaaggcagactttcacattggccatgctgttgagaaggtggtttgggcagttttcttctacaccatcccagatttaaatcctggccatcctttgattgtctagttgaaattccatggtctgaatgaaatctttttgtcctcacatgcaggcgtcttaccttcctctgaatttctcaggtgcacttaacagctatgttgtagttgagactatggccttgagggcagggcctttgtttcttactctttcatgaccccctccctctgctccggccaccctgcagcactgacatagtagtaggtactcattaaatgcaagcattgattgacctgcctgcaaactgggtgacaggctactttatcatctttcccgttccttacctccaaaagtaacatcccaagagctgtatttctgggaggctgagacacctgttttgaaaaaggctttcaggtgcactgtgcagtgaggggcacattctaggccaggcctgcagtcagagtggaagcgtggagtggtctgtgctgctctcagcactcattccaggatcagctgctgatggcagggcttggagaagggctgaatcctagcaactctacaggaaagaagaaaaatatcatctcagtatcccaggttttctcaggcagcagaaggcagtagtaaacaacccagagggtcctgagttgtcgctgtttaggaaaaaaatataggtaagtgaggccgggcgtggtggcttacgcctgtcatcccagcactttgggaggccaaggtgggtggattacgaggtcaggagatcgagaccatcctggctaacacggtgaaaccccatctctactaaaaaaatacaaaaaaaaaaattagccgggcgtggtggtgggcgcctgtagtcccagctactcgggaggctgaggcgggagaatgacgtgagccccggagatggagcttgcagtgagcggagcttgcagtgagcagagcttgcgccactgcactccagcctgtgcgacagagcgagactccgtctcaaaaaaaaaaaaaaaaaaaaaaaaaaaaaaaaaaaatatatatatatatatatatatatatatatatatatatatatatatatatatatgtaagtgaatgaaggaatgagtggagtgaagcggcaatgagtgaacgagagcacagaccaacagcgtgctgtagtggcaagaagcctggccggaagcctggagccatggggttcgcacgctagcattttccttactttttgggtgacattggaaaaactgcccaatgtcttctcagcttccttatctgtaaaatggggcaaaagtacatatgccccagggtggttgagaggatcagaggagatcatgtttgtgaaagttcccacttcccttgagtccttgtctaatgtcaccaggggctacatggatcaacaagactgtgtgtgacgaatgcgtgtgtgattccctcactgagtaggtttgaatttggaaggtgtcgactgcatcctgtctcccaccctctgatgatggctggttatttcagatggggaaggcggtgcctctgtgaactgggcttgtcctgcagccagtttggtgctttccctgtgagctggactgtgtgagggctgagggctgactccagccagtggcaccttcccagtttgcctgtgtggggggacagcaggtgccaatatgattagctctgggggctttggcctagcttgcctgcaacagcacttaatttgggggagtccagccaatcttctcaaatgaggacttgctgaagccatggctcatgttccaggattcccctggacctgctgccgctggggcggcatgagggatcctgattcagggttccacagctctgtccctgtgacttgaggctgcaaacttccgcagggctaggggcaggctctgctgttgtttctgttcctttagcgtcctctgcaagcctgtggtgtttggagaagaacagtgcacctgaagtcagaaggccttggtttgaaccccctgctctgcctcctgagcagcagctctgtgactctgagccagttgcttaatgtctctgagcgtcatcttcctcactggtggagagaagacaataatctctaccttgagggaatggtgcaataatttaatgttaattaccatttatctagtactttctgggagtgacaaacacttggtaaacactttacaggcatgatttccacagcaaacctgagaggaaggtgttatgcccttttacagatgaggcagctggagctcagagaggttaggtaacttgccctgggctgtacagctggtaggttgcagagcctgttcacttcagctgcctgcctctgaggcccgtgcccttcgctgccaccaggatgcttcctccagtagataagatgatatgtaaagaacgcccggcatgctgttggccggatctgagtctcacccagcccgtggaatttgctgagagactgcggctttctggggactggaaaaaatggaggcgggggtagagaagagacgagtaagcctgggtctgtgcttcccagcctttgtaggggaatcatctgagagtccaggcggtggggtatttttggtagcaggctcatgactcttctccaggttcagcaggagggagagggtgggtagtgacgtacagggatatagctcattctgcaagttcatgaaaagctctgcaggctcagatcctgtcatcactgggcaccctctgggttcctagtactgtagggcacatttgagcaatgtcatacagatgtggccctgcccttagggagcacctggttgtcagatagaaacgagcacacatgtgaaatgactgcgagcagcagccaaggcagtgagcagtgcggtgtgaggatttgtgggaggggccattgctttgaatgactcatcagggagggcctcctggagtaggtggggcggcagctgaagcatgggtagaatgtgtccaggagagaggaggggctgtgagatacatcaaaagagaaggctcatcccaaatttgggccacggggtcattgtattatcctgatcgatgtcatcccctttgtcacatttttaaagtctcctgtgtcagcggctctataggaagcccatcacacagatattcctgggcttgcctcctgatgggcttgcctcctgatgacttacgatcaaagacaggctggtgcccacctacgtgaaatgtgacctgcaaagcattctgtgaggccgttctggtccctgtatttcccacctattctccttataccagggctacctcttggccacagaacagagtgtccctctggccgggagagacctcaagttggctttgccaaattccttccctcctccctcaccaaggacactccagtggacagccagagcctctgcagccctgtcccacccgaggcaggctgccgtggaaggggcagtgctcttagcccactcttctttctctgagcttggcctgccctcccggttgggctggaatcgaaaacctgattgatctctccagaacaaatggcagttttatgatgtagggtttcagctttctgcaagtctccccctccccaggcacagagagggcagggtcagcttgcccccttcccttccgaagccagaggtgggcattagctccctccagctgtccctgagtccacacagccagctgctgcctgctgcgaaagggcattgccaccaccatctgcagctcatttccctggtgtgaattttgcaaacaaccttcttaatcatgtttatgaactcagcatacatttgctgcaggttgagtttcccgtgatgatggaaagcttggttataaagccagcaggttgggtttcaaaatccagcctcattgtggatccttctctaccttcctctcctcttccttccctcctcttccctccccagtcatcctcaagagaaggacgagactattccctcattttcccatgctgtttacaaagcccttctctctctctggtagagaagatgcattatccccattctacaggtaacagtaccgagggtcagagacaccacgtgatctgcccaaggctcatggttaacagccaccgagctgagccttgaaccctgcttctgcatctgtgtcctctgctgttcccactctgctgagcaactttgacctggctggcatgacaggcgccctccctgtgcatctctcaaagtcttctcctgccccaccctggggacatgtgtcctgagcacagtccgcagctgccaggggccagctttgtgctgaattgtggtttgtggcttttatttcttcccacgatgcccttcgtgaatgtcattgagtttattaggtccggctccttctcctttgctagctaggaataccaaaccctacatggtcctgttacccagaaaacatcgccgacccttccatgcctcacgggaacggccctggctgagagttggggcttgttgggtttagattccaaagccagctatcctttattccctgttcgaggagaaagactcatgccttcatttctccactcaaaaaacggggtaaagattctctctttaaaccctggtccctactggggcagcaggaaggtgcactgggaaagtcagcagaggccatctgacagcagcagcagatgcaccgtttagtgcttggcgtctgttgaactgggcctctcacccatgggcatgcagcatacgtaggtgggtggtggggccgccctttgtgtgtgtaacaccttcattcccaagctgtttccttgcttcatgttctctctggtttccctgagaacatgcaggccctcccaaaggagggtcgggtggccgccatctcagcccagagaggggtaggtgagttcccactggcacccagcatggcgttagacctgagggtgccctgattcatcccctgatcatgccttctgttttccaggcctgacttcatcatcctgggaggaagagagcaagtgcacattcctcccttgtgaaaaagagggagagaggcaaggcgtagaggggtgcctggtgggtagtgaaaaagagggagagaggcaaggcgtagaggggtgcctggtgggtagtgagtggtggggctctgttctctgttgtcacgttcttgctgggaacgctgggcaggagcctgcttggctgggacttggcccctctctgagccaggcctgcccgtgaatgctgcctccctgactcaagcctgtcatctgaaaagcacacgctggcacacccacacctacacagagggcagcaccttctttcccctcttggtcttaacttttaccctcattaacatgatcatgatggtgcctgtattcccatttcctcaagacctccatgggcgagcagtgtctgccaggcagccgccaccttccccgctccactgcccgagttggatcccagcaaacgaggtcagagagagaggagctcattttttgccttttagaagtagaaagtctctttgccgggtctgctgagctttcatttggtctgaactgggtagaggttacttgcataggtcagcacagacagtggcattgctggggtggaaacccaggagtgctggttcctggtctgccctcctggacttatccttctgggagggtcattggagcttccgacagggtcctgatggggaagggtggaaaagggattccttgatggggaataaggaaggagctgagtgcaggggaggaaaacagctggggatgtggaaattttgaaagggaataaagccaaaaaaacactgactatataggggggggacgagggagggcattgccacgaccagaggtgcagaggagaggcctgacaaagaagggccaggtgtaacgaatgaccttatttagtcctcctgtccctattactccctttttttttccttttagctttttattgtggaaaatcttaaacattcacaaaaataaagcacataatgtagagaacccttgcgtaaccctcacccggcctccacaaccttccattcctttatttcctctactttcaccccctgttttcctcctcgagtattttaaagcaggtcccagacatcctgtcattttacccacagctacttttccagctccttgaggggtgcgtttggagtccagaggccccgctgcaggctacggggagagagagagttgtgtggacgaggtgggagagtgtgaggccaggtgggggagcagcccgggagcatcgtggatggtccttgaggcgtgctcagccaagggggccagcagtcactctcgctgattgagtgcttgctacgggtgggacattgcactgggtacttcacacacttcaggtactcattcctcagcacagttaagaatggtgggctcagaagggtctggtgacgtgctcgagctcacacagctgggcagtgaggaggccaggatctgaatccgggtctcaggactccaaagtcctggtcttgtctgtcgctatactacctctgggggtgttaagacacagctggcacttgagggagtaggtgtttaaacccagggctgtctggcttcaaatctatgatccttacactacaccagcctgtctctgctgcactgtggtgttaaatacgagcataatatgaacttctgtgatttaatgtagattttatatattacaacaatagcactgagatggcgtggacgttggagagttgtggcttgctggctgttgctgtaattaggtctgtataaaaaaaatagtagcgatcagtaaacatgacagaatggggaatatcactagtaatcaaagaaatccaaattatgccaacaatagtatgctattttcttgcctttcacatgtgcatggatttttaaacggataattgctaatatgatggagctttctactacagcactggttgggtgtaaggtgttaaaacctttgaggaaaatcactttgcagagggttccaagagccttgaaaacaggctcatcctctggcccgtaactgcagctctaagactccattctaagaaaacaatcagaaatgctgtcaaagattttatgtgttagggtgctcattaaggaagaatttataataaaggacaattaaaagcaatttaggtgtcccacattagggagaatggctaagtaaagtatgatatgtgtgtggataaatgagtttggggaacgattaaatgatagggggaaagtgttcacactgtggcgtggcatttatatactatgtattatagatgtctaattatatattatgaacatacatactgtaaagtttgctctttttggtgtacagctgagttttgaaaaacacagtcatacatgtgtcaatataattttaggtgaggaaaaatggtatatggtatgctcctaatttttaaaaacatatatgtctacaaatacaacttcatatgaccagaaggacatcagtaaagagtgatcaaactaagtggccctggagaaacagcctgcataattttaaacaagcactttccttctgggctcgtttcttccccgacattccgtgagtgcccttatcccagtcatggtcagcatggtgggtgtgggctctgagccgtgacaggcgctgaccttgggtggaggtcccggccttgccagtgtgcccagtggggctggggaggcggctgggcacagcgagcctgggctccggtgtgtgtcactgggctcagtatagaatggaatgctgctcactggggccgtgtcctggccgaagatcagtggagggcaaagtcctctcccctgccccctccccaccgtctctgccatgcagctgcttcggagttggggctccagcacacagggggccactcgccctagagaaagagaagtccactagttctcccaaagaccgagaattcttccttttcctctgagtggggtcagcgaatcgggggagagaacattcttgctccccgcccaccctgccacctctaatgttcctgaggccagcatcaggggtctcccggttagggcttccttggacccctgggggtgacattattcttaactttgttcccagcagggagaagcctgtgtgtgtagttggtccaagcatctagaagctgctctttcaaagtcatgagctgggttgggatggggttgagctgcttcagggcaaggaggcccttgccagcagcctgggagtggctctgccacccgccctgctctaggctggtgtgggtgtggcccaggccctggacatgccttctgcccgatgcctggagccctgggatgccacccagccagccccacctcccacctctagccaacagcaagcacagctcccattctgtagatgaagagcaatagcctggacatgtgacacggccagtccaagctcccacagtgagttctgaacagagcccagagtagaaactgggtcccctggtggccaggtgtttctttcccctttgcctgccagctccccgaggatggggactgtccctgctatcctctgcggagcccagctgacagctcagggctgcgtgtggaggatgtaatggacaagcaaggggctccagcggtcaccgggcgtgactcaggcctcagctggaggggcagctgccacagtggggagccccagctctgccctgaacatattgtggagccttggacgcattgccccctctcagggcctagccacctgctgatctcccaaggactcatgtctattctggtttctttcctcccaggattttgagttgtgctgactgccaggcatcgtgtttccctctggtggctgcaccacacctcacacgtgttccctgctgtgcagaagtgatgtgtgggcctgtcatagagggaccctgtggcagggcatccagacgggagctctgtgggagaactgggtctccaggtctcctaaccagtctctgaatcagcctgagaaagttggggtgtggatggtacatttggagggatgaaggagcagggaagatgccatcaatggaccttaaaatccaatgtagaaaacaacccaatagagtcatccctgcaagcatcataggatgccttggtttcccttgagcttttctaccgccttccctgtacccgagttactgtccgtggttgagttccccatctcgttgtctgctggactcacccatcatctttccaccatcaccatcgcagccactgtatgtggagtgtttctcatgggccgggcacggagctgggtgctttaccacctcattgaattcctgccgcagccccaggaggcaggggctcctgttttaacttatgttttgcacatagggcggctcagagaagttaagtaatttgctctggtttcacggcagtttgtggtgcaccagctctgtctgactcaagcccctcactcttcccatcaggctgcaccgatcccctcatccccacagggctaagccctgagcccaggagatagggctgttggctaagcagcttagggcacagccagatcacggcacaggaagcttcagtcgtggggaccgatgaggtggagaagcagccaggcatcggccctcctgctgtcaccctccctggcttcctcttcagggagggtgacagcgtaggggttgacgcccgtggtctggtcttgcccaggctggctgaggagggccatgtaggccccattgattttctgtctcctctgatatggggtgtcaggcaggtggagagcccaggccagctgctctaggcagcaggggagcgagaggtgactgacctcaaggccgccacctctgagaagacttctcttattgtactaccccctgcagtcatcctggggttctgctgcctccacatgccctttagttctgcattcctgggaaccagggcttacccgcagggtcttggcagtcagtcataagttctctggtgcctggcacctgggccaaggctgccctttcagcttgcccgttgggactgctgggtgtaagctttaggagcagggcctgtctgggagcactttgtcccccacagtggactccagggtgatgggtgcttaagcgatgctgtttttgaccccaacagtcttcttggaggcagggaggtgtctatgtctgtgacgcagccttcttgacccagactcttgtcccctccccaagagactgccagccacatgggccctggtcccagtaggtaagcgggtcttggctggccttatcctccccctgcacttcccttctttttctggacctccaaagcccttcagccactccctcaaggcctgtggacatctcggggtgaggtgtgtggaagccccacctactcccgctccaccccagccggaaggaggccatgtccttattctctgccagccgcagccctggagccaggtcccagccccctgcagatggcgtgaggtgcgcagatgggggcagaggcagctggtgacgtgggctggggcctctgaagaatggcctggcgaggtctgctttaggagaacgcactctcgagccacctcacgccccaccggaccacgcgctgcaggcagacagcgagcgccagtagcagcaggtcccaccagatggcgatcccccagccacccccctaaaggggaccatgtggtagatggtctctttagtcacggtgtgagacccgggtaatggggagagggtttgtgggggccagagctcagcagtagagaagggagggtgtgtggttcactaggcttgcctgccccagccaggttcggtggagtcgggagcctcgagggttttccctgctgaggctcttcctcccctgctcctcctggggcagtggacacagcctcatctctcagcatccagtattgtgctgtggtagtttcaggggcccccttctgccaacctctctctctcactctgtgcgttagcctcttgactctgtgggcatcccggtctttccaaggactctgtagcagcccagcctatctaggtgctaagtgctcctgggaagaagagaggaagacagaccaccacgtccccaggtacagccacactcctctccagcccaggcaggtgcattccctctgcttctctctggcagcgcctggttctggaactcggcactgctctgaccagaccatccaagcgagtgagcaggtgcctggaccaaagcacgtttcttgcacctgccagccggtggagcagccctggaaggtgccaagcccatttctggctctcgggccttggccaggggtggtgcccaggggatgcaggaaggatgaccctggaaccactcctgggtctccaccctgaccatggaaagggaaggctgactcttgccgagggagagaaatggttttcagtgttctttttctcagcccccttttgtgtgctgcaaaggagggaagcaagttgagttggcagcccaggggaagggagtgaggcgggggcaaagtttccccttgatttgccatatgacctcggaacatctccttgggcctgggccacctgtaaactgaggagggagaagcctgcctgccccgtgtcctctctgcctggcctccttgcagtatatcggaagaatcagagccaccaaaacagtcataagagggggtggtggaggcatttggctgcatctcccaacccccaacacgctttgctcacagcacctgggtgtggtgggcagaccggcccgtggcacggagccatcgtcagcatggatgctgtatcttatctgcatttttggtaactggtggaggtctccaattccttgtactggagagtctttgctgggcggatttgggcattctcctgcccagcccgccttgccttctgactgtggcgcagagaggaaggtggggtgggcaagagaatgcccaaatctgcccagcaaagattcttcagtatctccctctatattgggctattcttgcattgctataaataaataacctgagactgggtgatttataaagaaaagaggtttaattggctcatgtttctgtaggctgtacaggaagcatggtgccggcatctgcttggcttctgctgaggcctcagagagctttcagtcatggtggaagatgaaggggaacaggcactaaacatgacaaaagcaggagcgggtgagattgcggggcggggggtggtgccacacactttcaaacgacccagtcttgtgagaactcacgactgtgaggacagcatcaaggggatggtgctaccccatgatctagtcgcctccccacttccagcattgggggttacaattcaatatgaattggtggggaccaatatccaaactctatcaccctcttccccaccttttcccagctccagctccccaccccactctttgagagctctgcagccttcgctgaggtcaggagaactttggctgccttggcagaaggccctgaacactgtttccttcctgaggatgcatcctctttccctgggcagggaaagaggcagatggacatctggcaaaatttcccacttgagaagtttgggattccgagcccattcctccctcagtgccagggaacagtagcccaattgttccaaacccgtgttctctgggtcagtgtgcctacatccctcctgaccatgacactcccattcctgggcctaataatagccccttttggggtagggcagagcaaaacttgagtttgtggctgttcagatccatctggtatcttccccagctccgctctctgaataccgccccaccatcccaccagcctgccatccaggtggctcagaggaactgccctaggaccaggggggaagacatctctgctttgtagcctcacttgcttcctggggcagagggaacaagaccaggaccgttcaggggatagtggcgtcctgggtgaagtggggcaggttccaggatagattttctgcaatgtgcttttggccgctgggaggatgggtggtctgaaaagagcacagcctgggagaatgggtggaagggagggtgcctgtttttcagggcagagaagaggagcaacgtactgtgcacacatggaaggcacccaggacacgttcactgtgtcgagcatcgtcgggtttattaagaaggtgtcttgggaatgactgtgagcatgtcctaggcctggccctgagcagttaaggttatagcagaaaggacttgacaaaggcccatgaaacttactaaaggcagagtcagagagaggagctgcggtgacagctgcttgtggctgatgagcattactggccagcccccccccccccgccacccgcgtccccaagtagagtgagtgccagtcgccagatggttggagtgtaagccagcttggggcaggagatgggacctaaagatgtctgggggtcctttctgcctttgactctaagtcttcagggcaggagaaaccacaggagtgccgagagagcgtcagttcagaaagacttgcagggtctcaaatcctcttcggagacagacatgggcgagggaagacaccttaagagaaatggagttttccagtctacagagtacccgtagggagtacccactgagtaggtgtgactttgcctgtgagccagtctaacttcacgtccattgtcatctccttttgacgttggccatctggttttgagaataggctgggcggttcaaatctcggtcagcctcctccatgctggtgtctagcccagcctcctctccatggatctgttgatgccagttcgctgcacaggctgtgcttgtggtttccctgtcaacatccccctgggctatttgtttcccactgctgggctcccagactcactattgagaggaggagctcccccaccatcctgcagaaatgctgaccccttgcctgtcgcttctgttgctagaacagggcagcatgtaccttctgtgtgtgcatgccagtggggaagcgcagcggggcatggaggatgatggattagaagactgcatcttaatcaaatgacagactgactgtctgcttgcccctttcccagagatgtgctcaacctctccggattagagcaacagccacttcattttaatcagggagctaatggctccctgaatgcctctttcctggcaatgtctgtcccctggggattttgatgagattgccctcacatgacactcatactccctaggtactttccagacttccttcaaggtgctgtggcccccctaggcacactctctacttatttagctttgaaattgtcctgccttttctgaacagattggaggtgtcattccttgtgggatagacatgggatagagtttgtgagggctgcagaggaccactggggtgtagccctttcttggggctgctgctgtttctttatgaaaatgtgtgctctcttagtttccttctgccttcttgccctggacttaatgttcctgaacattacactcctgatctcctgccctctcttgttcttctctctttccttgacaaacctgcccagcctcttggtttcagctatggattctgataataacttcttacattaagtgcctttgtagtttacagagcatttttacgtccattacactcattccttacagtgagcctgggaggtggaatagatcatattttttttttttggaggataaaattgaggcacagaatgattaaagccacagtttggttatgccccctgctccccaaaagaatttgactttgaggtcacacagtgtgtggctgagcccagaacggaccctccctcaccacgtttccagctacatctggtgtctccataaacatcttccactggtctttcaaacttgtttcaacttcttgcttcaaaagtcctccttggtcctctggttcggtaatggatcccaccacctgcccagctcccaggctggaaacctctgtctgcccccctccgtacccatgccgcctccctgaggcccctcctgtccgtcccacccgttcctgtgcatttttactgccatgcccctaggccaggcctcactttgcccagtcactcggttgttccctgatctccctgtccctagttcctcttagttcattcgatacaggcctgccagagtctgcttcccagggccttagccatgttaacagccctctctctgcttctgcacaaggccccaccacagaagccggtagaattcatgttcctccatcttgtcacctggaccctccagctgcgagtctttctcaatgactccaggcaccccgcgggtggtcagacctcactgctctctgttccaaccagtcacacatggagcctcccaggaagtgtcacttcctgtcccacttcctgcccgcatggctcctgctttccttcctgcccaccattctctccagatcaattacccgtgctcattaccagccctcccccttttccttaaagtttctgtctcaaacgttgcttcttccatgaaaactttgctctctcctcaaggcagaacctctgaattcctcttggctttgcctccctcctacaatccttcgtgcttttcactcgtaccttggtcgtctgtgcccatgcccgacgttcctgagggccgagcccatgtctgacttgtccacaaggtcggaatggactgtggttagggctgctctccgagcacctccatatagcaggtgctgtcttagggcttcacatatgtttggtttcatctccacatcatccctccagggcagacatccttacctttgttttatgaatgagggaacaggcctagagagattatgtgatttgttcaaagcctctgagtgaatgatggagccaggatttgaactctggatgtcagactccaaatcccgcatgttttcctcctgcaatgctgcaccttgttgatgagtggggttgattgccccttgtcgtctcaccatgcacaagggcagtgctggcttaaaggatttcattttaaatcccttaaaattaaaggattttatttcaaagaaattaaactttcctccatttctttgaataaattaggactacccatgctgggtcagcagtccacccatcgggcatggatggtgggtggggtgggatgtttcctccagggctgtctttgaaggtcagaagcgtccagtgcccctgtttcctgtcatggcccttgtgtctctctccctggtgagtttatcaaagtcctctggatcttagccatgtttttatcctgtgccaccctgcatggtaacgagccccttgcctttacccattgcgtaaagctcagacgccctttatttgtcctcagataatgctttcgagcttcaagggttgcctggggttctatttcaggatctgttaggcaggtctgtgttggccctcttcactgtccttcatgattttgcagactctgatccaaccccatcagccctgtttttccagaatggagttcatgcctttttagggttcacccatcatgtctcactttttcacatgcctcttgggtgtctggtgtatttcatgtgtgagaatgagtctccccagaagagtggggtgccctgagggcagggccattattccctttcctctagacctgcccacagctccacacacaggaagaccttctcattgcacaggtagcccaagacgccctgtccttctcccactcccaggcctggccagcccatgctgaggccagcttctcagcagccacagatatcacccatctcaggttggctggctcagggtgcagtgtccatgacaccagaaccctttcctggtcctgtgacggagcgccagaggtatgcagagcttggctttcgggtgactgttggctgccaggcccggggagcagcccggtgaatggccatgatgggcacagcagcctgccctgaggaagggcctcgggccctgagagggactgaggttggaccggggtgacagggtggcatatggggatggcactgggctctgttccatgcactctctcttctcctttctgcctcctcccgcttctgcctttcttcctcatctttatcttcttcttcctccccctacccctgtgttttgggagttatctcagtcagaggcatgatctagtactaccctctccccaggttagtgtctgaaggatttcagttggtgactttgtggcactgtgggctacttagaagttgtggacattttcaagatcaaaggctgtctttggagatggctggggagacttggtggcatgtagagccccagcagagacctcctccatgactaagcattcagcttgcacccgctgtgtgccgcaggctgttcacaggccccagcagtgagctgccccggtgatgaaatcccctcgcattggtggcatcctccctggtggaagggtgctgggggtgtggggaggaggaggggtagggttggggactctgagtggcagatctcgactaatgatggtcatgtctgagaggggagaaggaagttcttttttcaaaagttcttttttcaaaagttgatttctgattataaaactagtatagtcactggagagtactggaaataatagagatatatgaaaatagcataaattaaagtcattcacaatgccatcatctagagataaccaccgttctgcttctggtgaatttctagggctgtatgtgtgggaagaggttcttttgttgcaaaggacatctttagttttaagggacagagggacacacaggacggtgggttccagcacctctggctgcctgggcctccttcctctgactgttggcaccagctgtcagcccctggaggaatgggcagcctgtcggcaccggcttgagctcagagctgggataggagtgttatgctggaaaggggacccggctcccagggagcccctagtgtagtggagaaatacggagccagaaggggctgggaccaacagctcacatgacagcccctgcctgaagcagagtcctggcagggggccactgggcttccacccagacttctcatggtggggacctcatggttaagccaccacatcggccagctctgggtccctgcgtgagtgagggtgaggggtcgttttttactttgtagcttctagcacctggtccctgttctgccccactagagtctcatggggcagaccccatgaaccatggagcgccccccgcacttaaaactctgcatacctccatgttcagagttgccgtgtccctcaagttctctaagaccagacgcctctagttcctacccagttcctgtggggaatatgatttccacactccctggtgctggtgtggccagggagaggtgtagcctctggccaggcttcgtggagcaggtgagactggaatggcgtttagagggtatggtgatggcagcgagatggggaagcccattccaggccagggaatggcacgcaggaatgttcatccgtggcaggtgtgtgcacaggcctgtgtgagcgggtgctctctccggggccagggagaaatcccagcccctgggctccccccagccccatgcccttatatagccgtccctgcactcccagagctccgggggtggggacggagccccctcctactgtacacatgcggggagcctgccgctagctgggcctgggccgactcttgcaagatcctcttgtcatcacagccggagtcagctgttggtttgggaagccttccctggtccaatgtttcacggtgcgcagccagaaatataaccctcctgttagccaagagcatgggatcttggcaggcatccgtgtggcctattttaaactgaagggaacagaaagaggtgcctctcaggctaagctgaggacccttcctttgcagggctgagtgagcgggctgctgggggcgtgtcactttctcccttgagggccggtggacatctgttagggggagggggtgcagaaggtgggaaatggggctatttcagggcagtctggaagaaggttttcacgattgcacagcaggccctaaactcacatttggaggcctggttgtcatgccctcccactgaactgctgcgtggcgtgtccgagtgagccactgcaccgccctgtttactctctcccacctggaaagcaggggctcatgtggatctgacccacctctcagaagtgctcctgtgtcctcgggggtggtgatcaacacgttctgggatggctacagagcctgtcgtactgcttcatgtattacagtctctctctcccaccagcccaagcctgccctaagcaggcccgcgttcctaagaaaaccaaataaaaagacgataggaaaaatgcagtaaagatcattaaattgcttaggaggctgcctgccggctcagtgaacaaagtaataacaatcactcatgaaggatgcagtggagcctggtgcttaagattttggattctggctttgacctgcctagctctcaccctggtaagttccttgacctctctgggcctcgtttctcatctgtgaatgggggtgacagtggcacccacctcctcataggttgtggtgaggatgcagtgagatagttggtggaaaggaagggtgtctgccgcaggaagtgttcgctgagctcggccagtgccatggggtttgcagaacatccttgtagacagtccctgcgatgatgaagctcagagagcacaggccagcgatcagcccaggtccactcgggtagaaatggcaatcttcattaaaggtccacagggtgacaggtgggaattgggatctggcgactgcccttggaccccttttattgagggtgggaggctggtggtggtggtgacagggtgtttgttctggagggaatgtgggcagtgtgtccctgggaatgttctgtctgctgtgcgtgggcctggtggtgtgccctcctggccaggcatcagcagcacctgtggatgtttggaagccccagaaccccaggtgcgtggctgcagccctgcagactctcgtgcaacaggaggtccagggtggagcctgtgaaaatgctcaggtgattctgatgcccagcaggggagtggagggataaggatgatagcgtcaaatggggctgggaacaagtcctggccctcctgctgagtcttggttatcaacaccacctcctgtgactggtgtgaagtgaaatgtaatgatgcatccggagcacccagccccgagcctggagcacaggctggttctgtaaatggtgctgacagtagtcactcctgcagcacaggctgggcaggggcccatgcctctgtgaggccctgctttgttttattggggtcaggtgcttactaccttcaggactccagcttcttttctgaccttttcaatgctcagacgctctcttccttgccctcatccctggcccctgccccaccccctcaatgctgagggagtctcttcattctagaggtgagaagcgagggagaactgcccacaagtcaacagaaaatggacgcgagtgcccagccttgccccttcccctgggtcaggcctgtgggcaccttctacaccaaccttgtgcccgatccaggtttccagctacatgctggacatttcttcaccaaagtgacagctaaaatggatgactcctgggttctgtcttgtccgttctgatgatgatgatgacagcagtatccagccctgtagaacgttcaccaggcaccaggcactgcttcaagtgctttttgtgtattaacttatttttgctttctggtgaccttgaagggcatactcttagtaaacccgcttaacatatatagaaaatggtttgcacatgaactgtgggtcgtcaagggctctgtttatgagtatgccttccccagtgctgtccttataatattgattccaagtcagtttccattaatgatccatgaatgatgtccagcatgcaccacgtattttcatgtggacatttctgtctacggtttgtgaccactgcatggggtggatgcatcatgcacacatgtgtgttgactgttgagtgacttgtatttgtcggtttccaggggacaggggagaggctggaaggagggcagcagctgccctgtcgccaagagattggctttgacgccaatctccccaccctgtgagcttcctgctgcagtcttcagctcccctttgtcccccagagcccaaaatagcaatgcacaatcaggagagacaatgagtagcaaggcacgcagctgagcaggagggctgatgggtgcagggacagtcaaccttgggccttccggcctgactctgtctgtcccgccagctccgggctttttatagagaggctgtgttaggcgagcccgggtgagctgtgcatggacctcatctgactgtggcatgtggacccttcgcagaggtggcctgaggagacatggcccccaggctgacctgggtttgaatctccccagcagctgactggctctgcccacggccacatcacgtaatgggagcagcgatcagggcaactgaaaaaggaaacgggccgagcccaacccagctctattattaaacttttctccagcactttctccccactcagccctttgccaccatattcctgagattgtccctgtgccaccccaaaggcacatggcctttgtaagctggtgtggggaggacggcacgggggcctgtgtcaattccatggaagcaccaatgggatttctttcttgtttggtgtcatagggtaattggtttttagaaagaactggggtgtctagctcagtaacccagaagccatagacgctttttcttttaggttacccttagaatatggtgagtatctttcaaacagacatgctctaggcaaagcctttgtgtagacaaataaatgaacccatgagggtttggctttgttggaaattgttagcattctcatccgtacagagatgagagcatgatttggtagagacgtagatcgtgtggcaacaagctggacacccctttgtacctctggtgtgggaggtcccagtaatcaggatgtatgcttgtgagttttcttgagttgaaagcaacccttctcttgcctgctatgtctttcaggcagggctgttagctggtcacccgcctcttgcagtaggtggaggtacctcctgcacccagatctaggccggtcccccattgccataaataccccactcccacccctttgctgctttggcctttcttcagactgttgggttgtcaggagccagagaggtgatgaaagaatgagaaagagggaggagagctgtgggggcggggtcccgaggcccagtggtgagctggtgagagaggctgcaggagccaaaccacgtccgatagcagtcctgggggcttcgtaaggagctgccctggaaaggccgggccccgctgagcgcagcactcaactcatcagagatgacaggacagagccacttaggaccagggaaggcacttgccgcaggggtccggcagtcgcagccagcatgacggaggccctgaggccaaggccacaggcctggcgccgggcaccacattggggtgggaggtgtctggttccccccagaaggcgagtgggttataaatagcggatgacgggctgtagcgagagctgcctctagcgtaatcgtcgatttcgggagcggcccggctagggctgggagggccggatgaggttaaattcggccttgttggctgattggcatttcttgagctgggtgctaatctcttcaggaggtcagataagctccccagcggcgcccctgatcttgactttggtagctgggttaactctttcgggggactacagaaaaccccaaagtcacgactatttcgcattgcctacaagacagcaggagccatcatggagctggacttcaagagggtccatccaagcgtgggttggctcctgaaatacacggcgactctcccatatggccatctctctgacgagtccattccctggggaggactgtcctgggatagtcctgtagtaaatgaagaaatcagcttcttcgccctggggagtagcttagatccagggagaacctggtttagttgaatatcgagggtgagttgggtgacaggtaccaggcaggtgacattgaagtttgggttttcttctcatcctgtcacccttctcacagtctgatgagttaggagaccgctccccaccaagtttccagcgactcttgtactgttctccaaccttataggcaagagcagaaagtgctgctctgtgggtcttgggcttttgtacctgagtctgctggtggcatgacatctcgccagttctgcagggagtaagggtgggtttctagtcctgctttctcctaggggtctcggaggaagcatgtgggcagttctctgctctttttccttcgtgcaccttggggtttcaacctggttttctcttccaggtcctaccccatttcctcccaagtggaggatgctgctctacttcctgctgggatttatagaccatactatgggtttcttggaacctcttctttccaggactgtgaaatctggttcccatggagtgtcccagcccccgacgagccatcctctgcttgatggctgctgtctctgcagcatccaagaacaacagtggctgcttgtcctattacaaactcaactgactgaaacctgctgagacactgtgggaataaattatccccaacaagctctcttgtgaaaagccaggcctgtctcctgcacctcctgccccctcttcgctggcatctcagcagggttcccagaggcagcctgctgcctgtcctgttctcacaccctttctacctactgtgatggtttctttctaaccacaagtgtgataggtcaagagactttgggcgggaggggtaggggggcggcggggaggcgacttgtgcagcaggtgcccagaggtggtgagggtctgattcattccttctgtttctttttgtgttcatcagagaaagagacctcagaggaggaggatcttagatggttctgcaggacaagcaggcccttccccccaggcagaggtgtggcctgagcaaagccatgtttatgggatgacaaacttccctccctgtattgtggagtaagatgttcacaatggggctccctgggagataaacctggggtcagctcatggaagaccttgagtgcagggcagaggatttgggctccactcatgggcagtgggtgccagtgaagctcctgagcatggacatggcatggtgaaaagcaattgcaggaagaatgattgagggggtggcagaggagagaggtgcagggatggctttgacagtgtaggggtctccagggctggttcgtctgcaggtgcagcttgctcagtctcgggctgagtccacaggctctgggggttcaagaagggagagccttggcgagattcattttgtgtctgagtcctgtgggtctaagacatgtcctttccatccagggatatattctggggcccagaatcaccttggtgtcctctcctttgagatggggaaagagagggcaggccctagattactgtggggagggagacctcagtgaatgtctctggcctgggtcatgtagcttgctgtcttctggcagcaatgaagagtggtcgtgggagccttgactaaccctgttttgagctgctgcttggcatttgagaccacaatgtcaggcaatcttgtggacaccatttcttatcttccctcctcctcctcccaccaaggctgcagggagcttggggtaactctagaacccaagcagcgctgaataacatcattccttgacccactcccctgccctcaagtgccggctcccaagatcttctcccaagccatgagaatggtgggttgacctggggccagacttcccttggttacttccagcagagatttattgaaatctcaatgcacaatgcgaatgtattcatggtctcagtggaccaagagtgcccagagggcagccagactacattgccccccactgtctcttgtccttaaggtgggatcctgagatgagatggctgataccccagtgatggtgcctctaggcagcccaacacctgtggagctagaggttgggctgatttaattagaaatagagtgtgggtctgagcccccagccagtatccagaaagaaggaattttacatgaatgtccactctgtactgagcatggtgcttatttagcctattagtttgctgctatcattttcattttgtatgtgaggaatgaaggcatagagaagttaagtcactttcctgagtttgcagagccaggacaggtatttcgcctcactggagtccaccgccttcatagcccaagttccttcttgctcttctttgacagagcttttcacagcctgcagcattttctctttgccgtaactcagtaccctgctaccactcccaggatcctggtgatgctctagaactttattcatcatatactaaatggtactttagaggaaagttctcaaggacagatttccaatccctggtctcctccctccctccatccctccttctacaggtatttactgagcccttaccatgtgcctggcacagtgcatcaccgtaggggtgcatgaggagcaagtcaggatctctcctgtcacagagctcacgtttagcagggaagacagacaatgataaataaacacttgaagtagtaacagactgtcacaagaaacggaaaggaagcaaggaaaacttgaaggataagcatgagccagccatgtgactacctaaggaagatcattctggaaaaagggaacaccaaaggcaaaacagagtgatgggcctcggacccagcagaggcctgtgagtgggaacccagcacgggggtggcgaggaaggcagaggccaggtcttgtcggccgtgggaaggactctgttccacatgtgagcaaaaaccactggagaaatttgaacaaggaccatcctggctgctctgtggggaatgggtttggaggagccagaagggctgctgggaaaacagaaaatgatagcagtgtagcagtggaggtggggagagatggatggactggagatgggagttggaggcagagctggcaggcctcactgatggatgaaagagtcacttggttctctgtagcttgagcaggaagatttctgctgagaacctagtacgcgtgagatgcctgtgaggcatccaggcagagataacaagggggcacgtgggtgcaggaggctggagctcccaggcagggctgcccactccgctcaacgggagtcagatgggggtggcccctcagggcattttaccatcctgtgcggtgctggacatagtttttggcatagtttgtgcttaataagtgactatggaaagagcaagatgatggcgtgaatgagttacccggacaaagctcattagcagtccctgttgtcacatgccttggggtggggatgcaggtttgttcccagtggatgtaacaccatttctgtgccagtgaagaatttggatgtacttggtatttgtagggatggggcttgacccttgtggttcttgacagcagaagtggaaacttttccccagggaaccagctggggctacacagaacagggcgaaccctcatagtcccgtgctgctgggagctggccttctgtgaaaacatagttcagctcagaaaatatctctcgggatcctactctacgcgaggcaccgtaggagatgcaaaatgagcaagatccaggcctgctttcaaagagttcgctggggcaagtccaacagcagtgaatatctgcagggcaaaatgtgttcagtgagggaagtcaggtgctcctggaatacagaggtggaggggcagggagggcgcaggccatgggcccttcatggaaatgataggcactgctgagtggtggagggtggagggaagggcgtggctggtggaggactcccagagtagaggcatcagccccaaagacagggggtgtgttcccagagggatgaggaccctagattgcaggtatagttgcaaaagaatatggaaatgatgagcctctagaggccttgaaggaacgccatgatcagccatatcccttgggttgtaggagccctctcgggtctggaaggtgtgatgtgctctgggcagagtgattggattgtggtgacagagaggaggtggggtgaccaacccgaactcctaccctgtgttctggccaaagggatgagactgggaaccaggtcgggagagtggaaaggaagaggtggctgcaggagatttgcggggatgtggcctaaggattagcaggtggatgaaatgtggagggtaatagtggtgatggtgatagttaacttgtatgagtactgactccgcattaggctgtgttcttgttctaagagctttagaagttttgtcctatttaatattcacaacagcttaatatggtaagtaccgtatgcatttttggaggagatagcattattatccccattttacagatgaagatttggagtcactgaggtcagctcacccagagttatatctggcaaggggtagagctgggattcagaacctaggcgctggctcgagcctacgctctcaaccatgggccccaggtccaagctgtgactcccggctggaagaatagatggagaactgcgtctccaaagtaggggacacaggcggagaagcatgttcaaaagactaggacagacactttgcctccgaagatgtgactcggggcatgcatgacacacaggaagtgggcctactgcttttcagtgcaagcagggagtttcgggcattttgcgatttgagaagcaacgtgggcaccctgttcaggaaaccttggttttcaccctcatgacgaactgggaaaagaagccctgaggggtacctgcacctggtgcaagagcaagaccctgacccgtcctgcatgtccagtgtccacagactgaggacactgggctttgtgtgactgtgagggcacctgacgcagccttgcccttcccccaaggatgctctggcctgggtggcactggctaagcatccccatttcagggacttggtgacccgctttttgcggaaggggcagagtctgcaggattacatcgttggaggtttgcttttgcaacagaggtcagagtttcctgaactgaagccagactctagctcccttgagcagctggtgccagaaaccttaaggttctagctccaagtaaaatctggttctttttctcttgaataatttctacttccagagatgcaaagccgccacgtggatggcagtggcactgctccctgtttgtttgtgggtgtctgttttgtgggtgcctggaggcagcaccctaaatccctccacttgcagtgttatttcttttggctcccgtgccagcctgtatctcaaaagtcactcttttgagagctgaagggaacgcagagccacaaagtgcaggcatctgcattctgccgtgccctcctcggctctctctggctgctgctctttttttttttttctgttgaataagcaaaagcaagagcaaatgtattcctcggatctcatatgaaaatgtgtagtaatcgtttctttttgctattttcaatatatttctgttctgttcattgaactttgttctcggtgcctcttgccagctcactatttatcacataggtcatccctccaccctgccgtttgccctttatgaaatggcatctttccccctccaggtcttggtggtgggaatgcttatccttaccgtgtaggggtgggaggagcggagggagggcctgctgggatctgacttaagagcctcccccagcctgtaattggtcagaggccgcgcacagctccgctcgttccaggtgagtaaagcgcctggactcagacgtaattgattctgactgatatccaggttggggtgtaattagcagtcttgatttaatggcattgtggcctgagactgccatctcctcccttgtatttaaatggccatttccctcggcaggcaggaaattggcatcagacctcgatggtgggaccctgagtaagtcgcatctccgagcctcggtttccttaaccagggcctttgaccatgatgtcgtctcacaagggggcgagcagtaaatggcagcacgtctcaggcccagctcacgtgacacttggacatcacttcctgccactcttagggaggcagatgtgctgggttccagcctcctggctctgtgggcaagtcacttagcctcggaggcctctgcctgctcacctgtgaaatggactcatagcagttgccttacctgtctcatacagccagggagaggactaagcagaagcacagtcataggttcttagggctggagagggctttggatattattagtttcaaccttttgttttataggtgggaaaaccaaggctcagaggagtgagtgacacccaggatgacctggcccgttggcagcacatagtcagtgagccgtgttgtttgggcttcatgacatcgcttcgtctaaaggcttacctgtctgtcagctcataagcatatgcggagaggcgcacctctccacgtgtggcggtggacgggcagatggcccttctcctccatatgctctggcctgtatgagcaggagggtctgaaggaggtggtgtagcaacgcaccggcctggggaggcgctcctgttgctgagctgaaaacttctttgcttcagcattcccacttccctccttcactcgggctcccacaatccatatatgtctgtttatgaaaaccagggcctctctgtgcccagcattgtgcttgatactagggaattgtgcagagaggtctgaagggaggcaggacaggcacccggcaaagtcagtactaacaaggcaggagaacgttctggggccgatgacggccagtcgagccactgcagagtgttggggggtgagggaggattgtgagcctggaggaagaggtggggcttcagctgggccttgatggctctggattggaccgagaacagtgcaaagggaagaggaaggctttttaggtagagggacatgccgtgagcgggtctggaggtggaggtgtggaaggtgcattttgtgaaccgggtttacaatgaagagcaaggaggctctgtgagaggagcatttttatttgcagagtttttatcaggtagtgattgggcaggcaagtgtctcagtgatttaggtcacccagcagagcacttgggaccgttactttggctcagagcattgctgagagcctgactgtacctgtcgctgtgacacttggctcacccgcctcgaggatgtaatggggccagagggaggcaggtgacctcccaatcctccccctgtctgagaggcctgggtcgaatggggcacaggggacccggggaagggggtggggacccagtcttgctttggatttgcctcggccccttctgggtcacagaacagcttcccgcccgccagcccgcctcaacccacctcctctggagctggctttccgcttatcttaatttattgatgaaaacttgttttacggtccagagcacagacggcagcagctccctgccaaaagaaagcacgcctgcaaatcgggaaagcaagccgcctcccggagatgggtggctggggaccggcaggacggcagagggagtagagcccatctgggcagacgctgctgcaggcctgggtggacagggctcggagaggcccaggagcagcctctgtgtgccggctggggccggggcagtgcgggcagtggcaggacctccctgcctctctccaccacaggctcccgactcacggctggcctccgtaacctagggaaggatggctgcaggctataaatactcataatggctttcatttatagttgtgtgcaaggcgccatgctaggaagtttattttcatgaacctcatttaatcctgacgacgactctatgtggtaggtaccattaattcccatttaaaacatgagcaccagagaaaaagtcgttttctgcggtcctgctggctggtaaacgagggaacctggaactttaaccgggtctacctggacccaaggccagagtcagccacggctgtctctaacccacacactccagctctggccattgtcctatctcacactgcagccacctctccagcctggtggtgttggtccagctggcccggctattcccagggtaggaccctgtctcacgatcttgtgtgtggtagaagccagcgcagtgctgggctcagggcagatgtgtgcaaggtacctgctgagtaactaactggctggaggatcccatgggcaggttactcttttccaaaaagcagaaatcctttcagtggcttctatgctttcctctgaaactccgcatccttgtgggtcaaataaggaaattctcaacattcttgctcactacatcagtgagttacaggcaccgcgtggaaaagggtccaactccaagggctccagtgttttcacctgtaaaatgggctccactcaagatcgtcatcaccgtttgcagagacacggtacatgaaagcgccctctggaaaacaaatggcaaagcattgttattatttccatgagctcctgttttgtggagatacaggtgcaaaaaggtccactgagctgcaaatttgtttattttgttcctccttgcttcctcttggagagtggtggagccaacagctttcacagctctggcagaatcagcaaagcaggtagtcgccctcggctggactgagcgtctgtccgctgcccctgcctgctgtggccgtgcgccccctcctttccccacgccaccacctgggctgtgtgtctgggtccctccacttcttggcatgcctgtgtcacctcccccaactcaggttgggctagaaatttgtcgaacatgtttgataaaatggaatcttagatctttctcaggtctgtaggaggcaggtagaggttataatcacaagggtcatagcaaattgggttaaaatcccagctctgtcagctccatgtgtgagcttagacaggatactcaacctccttgatcctttgtaaagtcagagaaaatgatagtgactgccctgtatggcatttgtggaaagggtgggactcagttcttggtgtgtgatacgggctcggttaatgccagctttctcctctgcttggctgcctccatccccactagtgtcttcaccaacactacttcttcatcccgtcctcctcggctacaaggagcactccaggcccagaggcttgtgtctgcacactctatcacagctagccttcctttctcagagtagggacgtgtctgggtgacactctttctggctttcatgggaaagagccaggcagatgacccagatcccagcagcaggaggtggtgggtaagaatgtggtttttggagtcagatgtcctgggtttcttcactgaacctcgctatgcttgtgttctgtcatctgcaaaatggggaggacaaagatgccactgggttgggagaattaaatgaggctatagaggcaaagcactcagactagcactggtgcacgatcggcactcgtccacagccacagaacatgaggaggaagggcagggaaggcgggccgtgggcactgggagcaggtgcagctgtaccacgaagagctccgtgacctgggacacgtttgtctggggaaactgtggacaggccagcagctttcaacggagtaacctgaattgccatgcacatgttgcaaacaggatgggtcacagtctcctgtgtgaccaggagagccctgaagtgggcacagtctggcacggggcagggagggatctcaggttgtcacttaagttggtgctgagaccatctctggcagagagacctgcgctgagccatcccgtgtcccccatgaagcatgtcagaaatgccaaaatgctggcgtgggtggacgcggctcccggctggcagtataaataatcaggctgtgggcacaggatccccagggagaagatgctccacatgtgggccctgtcaaagggctagagctagagagtgtgtgggtggctgtgttggggccagaggtggacctggttgtcaggcagtctttcctgatacctatttgtgtaattatggtgttacttgctgagctagagccatggaagatcaccctcattacattattgaaagggcctccgacctgccatgggtggagccgaggcagctctgccgaacgagaggcacccagtcatgaagtcttcactgtgtgacttttcttcacctctgggggcacctcctttcccaaaacagggagaatggagcccccagccccttcgccatcctgaagaatgagttacagtctcctagacgattggagctctttgccagaagatggtatccttgtcctgttctccctgcattttccaaggagtttgagtaataacaccttgtacagcatttatattctgaggaacacaaagtgctcggcaggcggaaccctgttcatccccacggtgtccctgagtgctggggaggtgctcttctctctctggtttatcagagaaacatctcagaaaggttaagtggcttgccagagctgcactgcacctcctgctcccctgggctccaagtcctgaggtctgggctgcccatggttctgccttctctgggaagcccaggtagctgccagttacattgccatccttgaaggttggtttcttaagcccatcttgcctctcacagcagccctggcttcacaattactgtgtgctttgatgctgtcagaaatgcctttctccccagaagcacaaaacaaaacaaatgcaggaaggaaaaaatatgctggtggttggaaaatcctttctcagacccgtctgacaagctattctgagttcttggtgccttcccttccactttacagtgaccttgggagttgagacagtgccgtgtgccggggcctcaggctgcctcctcgtggttcctccctgggcagccgtggctctgggcatgcaggtcatgagagccacctgaccatcccccactcctgcccaacgtagagtgcccaccctgcacatcatgcagtgttactgggtgcgggcggcctgaggctccacgctgccttctgaccagtgctgacaagttccagagtttggggaaaaggcatgtcgaagggtcctcctcaccccctactctcccagcaaagggcagtcccctccaccagctcagggaagcgaagcctccagtggaggccatgactggtttgtcagcctccctcttgggaatttcttccccatgcctattccgtaggtgctgcagcctgccctccgtgcattcctgcagcctaccctccgtgcgttcctgcagcctgccctctgtgcgttcctgcagcctgccctctctgtgttcctgcagcctgccctctgtgcattcctgcagcctgccctctctgttcctgcagcctgccccctctgtgttcctgcagcctgccctctctgtgttcctgcagcctgccctctctgtgttcctgcagcctgccctctctgtgttcctgcagcctgccctctctgtgttcctgcagcctgccctccgtgcgttcctgcagcctgccctccgtgcgttcctgcagcctgccctctgtgcgttcctgcagcctgccctctctgtgttcctgcagcctgccctctctgtgttcctgcagcctgccctctctgtgttcctgcagcctgccctctctgtgttcctgcagcctgccctccgtgcattcctgcagcctgccctccctgtgttcctgcagcctgccctctgtgcgttcctgcagcctgccctccgtgcgttcctgcagcctgccctctctgtgttcctgcagcctgccctccgtgcgttcctgcagcctgccctccctgtgttcctgcagcctgccctccgtgcgtttctgcagcctgccctctctgtgttcctgcagcctgccctctctgtgttcctgcaacctgccctccgtgcattcctgcagcctgccctccgtgcattcctgcagcctgccctctgtgcgttcctgcagcctgccctctctgtgttcctgcagcctgccctgtgttcctgcagcctgccctctctgtgttcctgcagcctgccctctctgtgttcctgcagcctgccctccgtgcgttcctgcagcctgccctctctgtgttcctgcagcctgccctccctgtgttcctgcagcctgccctccgtgcgttcctgcagcctgccctccctgtgttcctgcagcctgccctccctgtgttcctgcagcctgccctctgtgcgttcctgcagcttgccctctgtgcgttcctgcagcctgccctctgtgtttttccagcctgccctctctgtgttcctgcagcctgccctctctgtgttcctgcagcctgccctgtgttcctgcagcctgccctgtgttcctgcagcctgccctctctgtgttcctgcagcctgccctccgtgcgttcctgcagcctgccctccctgtgttcctgcagcctgccctccctgtgttcctgcagcctgccctccgtgcgttcctgcagcctgccctccctgtgttcctgcagcctgccctccctgtgttcctgcagcctgccctctgtgcgttcctgcagcctgccctctgtgtttctgcagcctgccctctctgtgttcctgcagcctgccctccgtgcgttcctgcagcctgccctctctgtgttcctgcagcctgccctctctgtgttcctgcagcctgccctctgtgttcctgcatagggatgggagacagctgtgccctcttgctcacttgatctgcccagggtctgcagcagaggcttgcagtctagaggccacatccttccatgcccaaagtgagcaggagctgcacgggctggtaggagcttgggattgctgagtcacaagcgctccctgtgtggccctttttcgctgcacccacccgcaccccctctcgtggctgcactgtgcatcctctgtctgggaagagcccctggccccactgcccaggcccaggatgggcttgattgggaagaagatgtggttttgccccgcgtgcacagcctgtcctggtagggctgcggcggcagcgggaatcgatgtttatggactggtgaatgatcactcctcttctacaaggctggcaggtgctctctattatctgctgctctttggcatcccggccacacgtcattttgtggtccttctgagggctgttcctcggactttgttccttctgacagcttcggccctacaccgggccccctaggaggttctgaacatgcctctaccttcttttccagttccccatggaggaagaaggcctgtgggtcagtttgagaagtagaaagatgctggcacccaagaaagtggacttaaggcccgctgtcaggtggcctggggatggggtatagatggaggtgcgggaggtgacctgcatcgtcctgtagcctttctcccagaaagaggcatagcttataatggggtgtgtggggacagcacatgatagatgcccccatccctccccttctctggtccttgctatctaggcatcgccgtgttggggactgggccatctctcacccatgccttcatctttgaagcccggaacagattcaggttctccctgctcccagggctataccaacctagagtctcacagatgccttgattggagcaagcccccaggcagggcaggtgccccccatactgaggctaggccaggaagcccaaacagatgggtagcacttcaacagggccaaccctgctcccagctaggggccagaggacaccaagccctttgtggagctgggggccaggactgctggtgactgggcatttatcccaccacgcagggccctgacacccctggaggggggtaggggctgtccccaaagtctcggatagaatctccttcatcgtggactcttccaccccaatatacacttcgggattttagattgcaagaggtgtaggtattgtaacaggactcactctcaactgctaggggttttggtcaattggggaagggttacaaagttggctggagagaattgacagtcttgaaacataattcaggagctttataactgcagaggcttgcagcccccaaacacgatgccccttaagtttggccgtgggtagacattctctcttagaactgtctcacatggagaataaccccattctggtataatcaaaatgtaactgggttgtagatatgcaaatgctttatgtaatgtttatttggaggaaaattaggcacaaaaatatgggtgtcatctccctgacacctttgtaagttggtgagattaggggctgcaaagtgaaggtatgaaggtgaattggaggctttgagagaaagtgtggggtccaacagtaatgaccaaggaatcatgccatctggcttgaagttatgcaccagctcagtgtgagactaaactgtgctatggctgccactcaagccaatggggccttaggctgaattactagaagtatagagctcagaacgtaggaggggaagagctgggtcctaccatagctggagcctaactttcagtttgagacaggcctgttttacttgttcttagtgggcttcttgggcaaaactaggattgatgcatgttagccacagggaagtagattcttgcattaataagaaagaattcctggctgattagaggtatgcagaaaaaaaaaaaaaaagaagaatggagtgcattgtgggatggtgagcattcagcccctgggagacccgtgtggctgcatcccaccccatggttccaaggtgctgtggtcctcctacctgctgggtgacttcagcaaagatgtgtctgtgactttgtcccttcatttctctccatgcagaattggaggcatcgtctgctctcttgccttccctgcccctcctgcctctccctttatggctgtgagaatgaatgagctgcgggggcccttggaggcaaggggtgtctgaaatacaaagcagcggctgcgctcctggcaccgatgtattgtctctgctccccatgatgaagttcttggcaggtcggcttcttccagagccaggcaggttcattactagccagcatgtcaggctgtgaaattaaagctgttttggtttttttcttttttaaaaattctccacatccactaatttattaaatgccattaaatgttgggcctggccttggctcatagaaacattagggagcactcagtcctagcatttgaaaatttcctgcaagcaaaaagtggatgagggtgtcaggggggccaggtcaggggccaccagtgacatctgatgccagaagcccaggtgccttgtggggctctgcagacacatgaggcagtggggattaaaatagggcagcagaggtgggagcaacctgagggcactgggggttccaggagtggggaagacggggtgaagaggaggctgctttttcaggaggatttgcatgtctgggtctggtcctgttccccagctatggcccactcaggcccctccatccatccccatcattcattcatttattcattcctccagcaaatatttatctagtaatccaggcatgttctgggccctacaatggaagaaaaatggataagacacaaacctgggtcctggaagtgcatgtgtgttttttttttttttccccaaagtgctgggattacaggcatgagccactgcgcccggccgtgtgtgtgtgtttagtgagggtaggcagcaagtctacacagaagcctgagaggtcctaggtgtgtcctctgctgtgggcccggcgctggcagaggagtcatccctggcgaggggccgctcccaccagtgggagaccgatgggacccatgagatatgggcagtggctgcccctaggatctaagcagcatggaagtgggtggagaagctcaggacggggaagcccgaagggggaattgtgtccctcacccccagagaaataggatgcctgcgtgaaacatacgtaacgacacgtggcagaagcctgtatttaaaccacagtcagcatggttcaaactgaagacaaggaagacaccgtggggatattagctaactacaagacttaacaaatgaggtgaggctggagtgtgggctcactgtatggccatagcctgactgggcctcagtttacctgctgcgcgtattgtggatgggcccctggtgacaaagaagatcctgatacagcctgatgacttgaggcttttctctgtgctgggggcctgcaccctttccctcctccggagtcagggcacggcccagaccagatcgccctgtgggatttgaaggcgttgccagccctgctctaggctctgcggatttaaccacaaaaacaacagacccaaatcctggccctcaaggaggccattggcaaatgtaaggatgggattcgtcttctcaaatttggatgtggatttgtttgtagccctgatttgaagttattttgaaatgccttcggctggggaaggggcaggggaggcttggtactcaggctggcccctggacctgcacctgctccggggagggcatcaatcaggcctggaccacaccaggagtggctggtgaccttctgcgggttggtgctagcattgcctggggcccaatcccctgagtcaccctgcctcaccccagattgtcccatcgtgggctagattatagctcagtcatctcagctgagacaaacccctggttttggaagggaattttcccaaatgccaccagctaagctctccggccctgagctttggctgtgccaccacagacaggccttgcctccttcctgtgctatgtgctgggctccctccaccagaggcggctcccctgccctgcacctccctctcctgctcctgccgcaccctctccctgcccgctgcactggcttcagaggtcagcttcctgacttcctgccctcctgcctgtgcggggcaggcctggctcaccaagacttcatggccaacctgtctctgccatcacctcctccctcctgcccttgctccctccccgatctcagccccggctgtccccagctcaccagctggcatctttgggcatatcgctgtcattggctctcccttccccaccgctggagggaacacatcagattctttctccaatggctgttctcaagatgttggcagcccaagggtgggtgcctggcgtggggggatagggtagggggcggggtttctcaaactctattgacaattggggccagacagttcttgactgtgtggactgtcctgtgcactgcggggtgtttggcagcacccctggcctctactcaccaggtgccaggagcagcccctcccattgtggcaaccaaaaacgtccccagacatgccacatgttccctggggagcagaattgctcctgattgggaaccactgggctgagggctgagagcaccatgtctcagactcggctaagactgcgccagagggacctaagaaatgatctcgtccaaatcccaagttttaaaggaaattgggcctccgagagctaaagaatcttaaggtcacactagggagcagcatgatgagaggcattttaggaaaagaatcaggcagctctatgcaggctgggctggaaactagaggccaggggcagggagggcagtgggggccgtgatctggacatgggacctgtggcgaaggcccagtgttggtgcctgtcacctgtcagtcggaggtcccctgggagcaggtagtgaaggcttctgcaccaaatgccagaaaccaaggttttgtcccagcccagcagtgtgactggggacttccttgtccccccgcttagcttcctggaaaatcgaggcgtgacctttgtgttttcttcttgccgggaggctctgttagtgttgggccatcagaagatgggagcagagagctcatctcggcaggagccccttgaggatgggagcgtggcagtggggatgtgcgtggcacccgctgtactgcacaggcctcctcactgggcagacgtgcaccatgcgtggagttgtgccaggcgggagctgtgatggaggcaggaacaggtttgagggcttggagaggaagccttccagtccagactgcgcccccgtagggtaggccgcagatctttcctgggggcctggaggactttggacaggaaatgggaaaggaagcagatttggggacagggcaccagctgtgttccctgagaggtagaaggctcccaggtgggtctggcaagaccaaatcaaaggatgtggagtgtgaagtcagagaaccagtttgaagagaggtgaccaggtcctggagtttctgacctaagaggttttcctaggtagaggtacctgagcatcccagcacttatcccaggagggaagtggagagagggctcggaaggggccccccgctgcaggtacacccacagtgggaaaccgcttcaggagaaggctgtgctttgagaacttttccaggcccgagaagggtccgggctctgagctctggggtcctgcgtgtctccagctgcagcgtgtgggggcgccctgcagctcccctgcagcgagtacctgcggcagtggggtttccgcttactcattccagggtctggcttttagagccataaatcttcagcatgaagatcataaattctccatggtatgattaatgaaagaaaaattgagacggcagcatagaaactgaccagattgaagaaaagtcagagtgactatttggatgaaagtttcagccatcgctggcgaacccagagcttctgaaccagcctggagcgccacctagtggccgtaggcggggctagccccgttccctggcgaagctttgtgatggcccagttgggcgatgctgtgggtctcagtgtgcccattctttgggagccctgacgtggttccatgtggggctgcgccaggggacaggaggcacaggcccactctccacagtgtgaaggacccaggcagctgctggacgtaaatcattcggacccccctgcagctccttgcactgtctcttggttagtaatacgtggcggtgtctgttcctacctttttcttcatgcacacctttctggttccccatttatcaaaatcctattcattcttcaaagcccagcaaggcctgtcaatgccaccttcaaaacatctcaaattggaccatttctcaccgctcctccgtagcctcctggtatgagtcgtccccagctctcaagctggtctggctcctgggaagaaagagaggctcgcaattaggcagggtagggatgcccacgggaaggtgaggggaggggacagacgcctccctgaggaagggcatctccttcttattcctccacaaacccaagcctaatcacagcagcctcccagttgctctcctggcctccctcgggccctcccgcggtcgcttctccaaacagcagccagagtgatctgctgaaaacctcagtgagatcatgtcactctccagctctgggaccttcccgtcacactgaggacacttgcacgtttcctttacctgcgaggtcccagctggcctggcccccggccaccccgcctgctttgtctcctaccatgtgtcacctcactcactgttgtagcacacggccagcgtgctcctccttggctggccaggctccttcccactccggggcttttgcacctgctgttctctctgtctggaacgttcttcccccagatagttatgttgctccctccccctgtttatttgggtttttgcttaaacaccacctcttccaagacaccttcgctgcccacaccctccccagttattttctggctctttacattgccttatttttcttcgtggcgcatgtcagcaactgcagttacgtcatttgttgcttacataaggtcagtgtctcctgtaagaatctactcttcgtgaaggcagggtctttgccagtgaggtgtaccactgtctccccagcttggagaacagggcctggcactgaatacgcaggtgttcacttgggtttgtggaggaataagcgaaggagatgcccttcctcagggaggcgtctgtcccctcccctcaccttcccatgggcatccctaccctgcctaattgcgggttgccctgtctcagccctgagcctctgtttcttcccaggaaccagagcagcttgagagcaggggctgggctgattcctggagtcagcatagtctgcacaggccctggcacagaacagctgcccgggaagtgcctttccagcaagcagtgcccggagctggccacccacttcacgtagcttattccaatctaattctcacagcagtccaataggaaggggatgatattctcactctgcatacgagaggtttgcaagctcacaccaccaggataagctggagccgggagtcctgtttgggtctgtgactcccaagcccttaccacctgcactttcacccggcatagaatgttctcgtcctccatctgcccctagtccacccaccctttagggactgcctccttcaactggcttccatgactgcgacagtgattgcctcctctgagcgcccgtagcgttgactgggcaccagtccatcccacctgggagtggtagattttgcactttgattgctcccatccagccagaacagaggcccctggaaaacaggtctttaaagtggttgtagcttttctggcatggcacactgcatgctgtaggcactcagtaaatactgtttcactgattgattggctcctcagactcagcacacttcccatgagctggcggagggagtcggggagtgccagctatatcgagcataaaataagacagatgtggagatttgcagccggtgaaatggaagcttccccaggtggagctggtggcgccggcagccccaggggtgctgttggggagagttgcttttcggtttgggggccgatcatgccagaggccagcttattggatgggtggtgaaggcagccgtggactcccacgtcccgcacactggccaggcccccagccagccgatgactgcctcctttctccatctgtgggaaattgttcttcagactccagtggacaaatggcccttcgggtcagagtaacaggacacagtcgctggaagttctggctccaagaaacccgactccgagggtcccttcccacctccagagatgaagtctttcttgcttttcctgaccccagttctcccctctcaccaggcctccgtcttggacactggggcctcttctctatcatgcagagtaacctaaccactcacatgtgtccagtaccttccacgtatttgttacgcacttttgcctctgtgtggtttaatccatcctcagaatgacctgggaggctcttgaaactggcacagtctccgttgtcacatggggagactgaggcacagagaggctaggggactgtctgggtcacacagccgacatgcttcgggtctgcagcccaacggtagtcccgttctcaccttgtcggttctcactttgtctgtgtctcagagcatggggtggggacctgcactgttcccaggtccatggacgaatgtgagagcagcgccaggctaatgggctttccttcctttccagctctgtggctgtgggctgctgggagtgggcatctggctctccgtgtcccaaggcaactttgccaccttctcccccagcttcccttcgttgtctgcagccaacctggtcattgccataggcaccattgtcatggtgacgggcttcctcggctgcctgggggccatcaaggaaaacaagtgcctcctcctcagcgtaagttctgtccaaatccccagcccctccaactcctgatctccttgcacttggacccctgggacaggcaagacctggaatattagccacctgggtgtccaacctgagcccagggaaactgcttctagaacgttctaggcttgaccacacccctcctcctcatggttggttatgcctacccctggttgtccctcccactccctgattagtcagctcctttatgtctctgtcctagctatctgggtttcctcaggaggagctggcttctcccagacctgggaagccccacctaggcgccgcctgtccctgccttccacaccctccttgtcctcagccctgcccattaccacctacccatgcctggccctttcctttccagtttttcatcgtcctgttggtcatcctcctagcagagctgatcttactcatcctcttctttgtctacatggacaaggtaagccttaccagatgggagggggcatatggaatgtcactgcccttagagttgggccaagcaggccagggtcccttccctggccagaggaagagtgctggcaagcagcacctgtgcagaaaggaacatggaaccaagggttgggaaagctaccaaggaaagagcagatggaaggttttgatgggggcagcatggggcaggcaaatttggaggatgggagagttgactttgtatagttccaggaagtggaatcctctgcatgaccagagatggcagtgggctgcctctggcgctagtgagctccctctcactggaaggaattaagctacttggagaagggattcagacctcatcaggtggttgggctgggtgatttgagagcaaaccatgaaaaacaaggaggaactctctgggcgacgctggctgagcaggactgaggcacagggaagctctgtttcctgcactagagcccttgaggacgggcgctgctcctgggttcaggaggatggtgggtgaccccctgtaacctcgccaggctgggcagttcgcagtcaagagcgaggttggccgggatttcagtctcttggggcgtggcaggccctttggtaccatgcactccagaactgtgtaaggagcagttcttgaaatagctgcctgagccacactgaaagttagagacatcgttaggatgagaaagaataatcttttagttttgcactcgtgaaaaggaagaaagaacaatgttgagagatttctctgtgccagccctgttcttggcccttttatgagaattgtttcccttaattctaacaacagcgccatgagtagatgctgctgttcaacatcgggtagaacagcggtgagggaggtgaaggtcacatgacctgtcttcctccctctagttcccagggtgtgttttgagaggggcagtctgtggggaagctgtgtagtggggggcgggggtggcagagtggcctgtgtgtgtggctggtcctgggatgggggagtggaggcacgtggtgtgtttttttgcctctgggtgttacagccctggccctgagtttagctctgccgggaggcggtgggtgcaccagggcctgctgtattctgaaactgggagtgtgtgcctaaccccgcacctctgttgggccagcagaggcccccaccccagtgggcagggccttccagaccagctgccttccctgccttcctcactcctcatctgtcacccaccatcctgggtgacctgaggtgggctggagagacgagctgcgtcctggttccaaccgtctcactgtgtccctccgcctggcaggtgaacgagaacgccaagaaggacctgaaggaaggcctgctgctgtaccacaccgagaacaacgtggggctgaagaacgcctggaacatcatccaggctgaggtgcgggctgggccgccctggtggggccaggcagggaggaggggtggcggccggtacttctagctgccttccccggtgacctggccgggcacctgtgctttctggattttagccgggagtggagtggtacccacgggggcatttgcctgaactgctgagtcagatgtgatacagcaaggtacagccagggagggatgaggatacaggaggggcaggcctgagagagctgtggctgagctttgggatgaatgactgaatttattttagcaacagatttgcctccatgatggggcttggcttaggtgaggaggccctggctctaggaggagaacaagtccatagtcccagatgctcccattttaagccctggggaggggccggcagggggttgggtggcagtcagcttgggacggtttacagaaagagcagaggtgctggtgggcaagcacagggctgagccaaggggcccagcccgaggggtgggctgcattgccctctcccgctctggtctccaggaaggagtgctcactcacttctccagtgggcccggctgaagcccaaagaagggacaagaagcaagccctttgtctcctcccttaactgcagggtggccacttttgcggggactggggttggcctgggcaggggaaggccctggggaggaaggggcgggccatggcatgtctgactgccccttccattcctgctggccagatgcgatgctgtggtgtcactgactacacagactggtacccagtgctgggggagaacacggttcccgaccgctgctgcatggagaactcccagggctgcgggcgcaacgccaccacgcctttgtggagaacggtgaggctggggatggaccgcttgggtccaagagcccgtgtgtggatgccccggcacggggagccctataggggaggctgggcccgggacactaagaggttggctgaatgtggcggtggggggctcacaaaaataaagccaaaagacaggtggaaaatggggggtggggctggacccacagttgggagagtcagagggcgaggggttgaatggggtctgaggctctgcagctggccttgcgggtggggcggaggctgcgccaagggatggggacagggctgaggccagggagggctgggaggtaagagcgaggacgaggtggaaggagagagtgagctgggggctgggctgcagggagcgcatgcttgggctgggaccctaacctcgtgggcctcgctccccagggctgctatgaaaaggtgaagatgtggttcgatgacaataagcacgtgctgggcacggtggggatgtgcatcctcatcatgcaggtaagaggggcgtccccagcagcctcacccaccctgctggcctcagcctcagagggaaggaagcacagagaagtgaaagcagtgttggtacacggcggagggtctggaattcatcacagctattcaagcttagcagctgtgcctgccaccgtttccgcagagctctgatatgagagcacgtgtctactcagcactgagagtggtgctcagggctgcctgtggccaggcccaggctgggatattgaagctggagtcaacccccgtgggttcccccagttctgcccaaaccttgagctcagagagccatgcaagacacacacggtgtcccccggtcaccatctttacagcctgtgcacatggcacactctctgtggtgaccgtgagaccacaccgggcttccttctgcctcctgcactcctctgggtccccggctcctttgaggattcaggagggaaggggcacaaacgagtagtgacgtggtcctgagcacacatcactggaaagacagccctgctgctgccaagacatcgcaccatgtgttccacaagcagacaagagaggcttgacaggagtcctttatttttctttttttaagagacagggtctcactttgttgctcaggctggagtgcggtggcgccgtcatagctcgctgcagccacaaactcctgggctcaagccatcgtcccacttcagcctctcaagtagctgggactacaggcatatacaccaccatacctgaatgatttacaacttttttccaaaaacagatggagtctccctctattgcccaggccgatctcaagccatcctcccaccttggcctcctaaagtgccaccgtgcccggctggcctgagtcctgaatgatccctgccacctcccactccccaccttggctcctgtgagcccccacgtagagccaggtcctccgtgcattccgtgcctgcagcgcccctctgagtaggcacacgtatgcatcctgcagaggttcgatggcttctggtctaacagccccacgaggctgagccagagttcacctgtgtgtgtctccagggtgacctctgttcacggttttcttcatgtcttcattccataagcattttcctggcacaccagtggccatccccgcttgctctaggtgccctgtgacatcccaagcctctcggggctgaggtcaggtccaggctgctgcagctcctgcctcaggcccctccccgtgtctttcagatcctgggcatggccttctccatgaccctcttccagcacatccaccggactggtaagaagtacgacgcatgagcgggctggccgggagtgcccaccccgccctgctgccctgtggagggaagaggattgagctttgtgtcacctgcctgcgctctccagatatgacccctgcacccaccccccacagcctgccctaccccacctaccctgcctcagcctcggacttctcagtgggtggagtgccagggaggaggaggcacacggagacctggggctcggggcccctggattcctgcatctgcatatgcgtatttgccaaagacgacagggtgggctggggtgcgctccggaggaacccccggcactgatgggcttctgcccctgcccttcctcacactgacactttgtccccacatggggtggggagcagagtgcccgccccgtggagataccgccccagcgggggctgcgacatccatggccaccatggggcacctggcggggcgggggtctgccggcctctgggcaaggcccctggagcatctcgcccaggctttttataccttacaatgtaacttttttattttattttactctatgattattcaggaatattatctctcagataagtttagggttagatttctgatttgtaactttttactgtgttgatttctttaatggtttgactttttttccctgagggtgagggatgggtgggaagagaggacatctgtccagtctcaatcaggacagaccaccgtgcgacacccaggaggctctcggatggggcgcgcctgcgccctcagaacgtgtgggaaggagggggcgtggacaggacacgggaccttgccaggcctggtgtctgaggacaggagcctgggagaggcgggtggagcgtgaagcaggctggaggtgcccctgcacgggaggtggcgtttgctaaccaatcgagctggaaatgccagggcaggggggccccacggtgctgtggcagagctagaggggtccttagacttttcactgatgagcagttgttggttttttctttctcccttcctcccgctctctgctggcacgcgaggcttccccttccaccccatgtgggtattcccacaacaggttctgcacaccccagttatttcacagacattcctgctagaaactgtcagacaaatacctctctagttcggatgctgctcactttcccccttgcttctggaaggggaagcagtccttaggttttgctgtgctgggacagtggcaggggacccacaggggtgaggacccacggtcctccccgccagccttgctcagctgtgggttgccctgctgggaaggagggaatcacgtccacctgggtcccaagatcttcgcctccttccctggggccacggacatcagcagtgggttgggtggcgattatatcatctgtgatcccaaggagaagaaatacagaaaacccaagagaggtcagactggctcttgttaccggagccacgggaagaaagcagccggagtcacgcacgtgcagagctgggcatgggagagaaacgggctggggagtgaggccaggagtgggattcagctgcagcagggcgccccctccaaactgcagctggtctggcttactgttttgccgttcaaaaaggtcgcgaatccgtgggactgagcacggggacctcacccgctagccagcgtctgctgcacttgatcaggtggggccttggtgggcggctgcctttcctatacagtttgtcttgtcaccctggtttcccactggggccaggtctcttctccagcctccacctgcctgtctgatccaagagctgagacacggccacccagcaccagtcactcctctgttcaccttaagtaacacacaaatcgggaacaggaggacagaaccgttggcattatcaggattcgtgttttgtgggggtgggagtggagagtagggtggtcttgtgagttgtgcagggtgaagaccgcttccctgagacaggggcagtggtgctgatggaatgtgggggaggcccacatttgagcaaagctgccctgcccttgtcccctggcctggcttcctggtaaggagtttcagccgcctccgcaggaacccccaaagtgcagattccggagcagacacatccgggcggagagactcagcagacaagtgctgcagttgcacggtgggacccggggcctcgtgcgttttttgctgtgggtggggtgggtgggttggtttatgcctatcaatgcaatttttaatttttgttaatatcaacagcaaaagcctagtgcattgggagatgtgcaacctccctgaaaatcttttctgtttctggagtacttcaggggtggcctctggccccagagcctttgccacagtgctcccaccagcccccacctcatccgtctgtttgcagagcctcatctacaggtccccacgctgccttctttactcactctgcgcttggccgttttgttatttggcttagtctacattgggcggaagtctgtgtgcacagagtgggtgttccttcgagccccttccactcagagggccacacccagcgatgccagtgaaggtggcacagcctctcttcagtttctcctgactgtgatctcactggggtagaattcccctgagagaattccctcactcacggctccctttgccagagtcagttcaatcaggtctgatgtgagcaatttacacacttgtctcagaaagtccctcagggtttgtagaggactgcaggggggcatccgctgcagactcagcctttctctgcagccatcctgcagtgggggtgagcgggcacaggctgagaactgctcttgggtggtggaagcaggtgtcacggtgcaagtctccccctgcacccctcccccagcttgagccgtgtcacccccctctccctccagcatgggcctgtgtctcaggctctctggaaggtggccctgccccggaccctcttgcaggtgtcctggtttgacttggaactagatggccatctttccaggctttggtggcccaagagcagtctgggtggatggaagtggctgtcccctcctctccagcccctgcccacccactggtggaggtgctaactagcagggacgtggcataggatgggagctgggcgtgaggtgcttggggtccattctttgtccctcagcttctcagagtccggccagcccttgtgttcccgtgccccacactttcctcctccccactgcagtgagtcaatagtccagggtggggcctggcctccctgccctgattggggactcaggaggtgaggcctggggggcttcctgccccctccttgcccacctgcctgcccccgggcagcacgggagggagagcagggtgagcacgcttgttggtttcagatgcactttctgcttgcattgccgtatctgtgcgttccttcatcctggtcctggctttatggaacaccatgtttttagcatgtttttaaataaaaacggataaagtgtcaaaagcacagcaggctgtctctcagtggtgtgttttgttcactcagccaaaactgtgacttaggtcgtggttggtgtgagggacccagagggatcagataccactcctacccttcatccaagacacacccccagggggacctcatctctcttttggggcccaggtcacagatctgctggcgtggggagggtctctgtcctctctgggtgcctgaggaatcctaacatcccccctcgaaacaggctggatcagggggcagtcccagtgcccgaggccttctgcctgagaggctgaagtcctgtctccgtaccaatcacccatcacacatggccagtcctgtggccaggccccgaagtgtatcgtggggcgggtatggaataagccactagcagcttccagtagggtaaggggcttcctgtaggggtgggggctgtcagtttcagaaacagtcttcttcccaatccctgtgatgttcccggggttcatttgaccttgatgtctcggactgagggggcctcacagtgtgtcttggccttttcagggtgactgggacagcctcaaagaaggaacaaaatcaggatgaggatggtcagcagggaaggccattaaaaccgcgagcaggaagagctgctggctgggccactgacgttgccgccttcctgcagtcgaagtctcccgcggccttggttggggtcctggtgtgtggggtttccttggctgtcagtcaaggtgacaagttgcagatgagaagctcagaactccccttgctggtcctcactgtgttcatgtccccagggtggaggcaggcgtgagggtgagtgtgcatgggggtctgagagcagttggaggtttggaggtgagcatcttgaaacccctctgcctgtggaactccatctcccgccttctcaagggagtggccaggtccacacagaattatcccaaaacatcaacctctggggccccctcctgcagctgctgtgtcccagagcctccagagacggtgccttgagtctgagccaccctctgtctaaggtccagctggagtgatgtccctgggaacctccccaggatatttaccgagagagactttgtggctgtagggtcaggattgatcgtggctgaggagcaggtgaccccctcatcgtctgcggaggacaaaccagctcataggaatttgggtggatgccaccctgtctctgctcattcttactctcgctcctgcccccaggcctgttgagatgcccactgggtcactgtgctgtgttttggggcttccaggcaatggaacacactggctgttctcttaaccctcggctctggttgccctggctgtgcgggagaggagcatcttctttgggacttctagtgacgaggctagcacctctgggctgggtctgggctcctctgtctagggagtggctgagatgacccgggggggggggtccctcctttgcgcccccattcttgtgtgttgtgatggaactgcctccccattggtgctcagcaaagggc

SEQ ID NO: 646 - DNA, 216720 bp, Homo sapiens
  source 1..216720: mol_type = genomic DNA
cctgcgccaccgccccaaccacccctgagagccattaggtgacagttgtgcttcacccgcaaaaggtcttcctttgccaatttttgtcacaagtttttgcatattgtttgcataaatttgcaggtaggattcaaaaggtcctgattccaattacacaagagaaaacacactgactgcaagtgcagttgaagaaggttctcagaagggcacgctggaaccgctccccggtgccaggagaggtgtttgaactacgtgctgctggggcgcccagacgggcttccccacgatccaggaaatcagagcttttgcaacgttggcttgaaatcgtggctaacaagacagaaaagtgctcttctcaaccccaggggaagactggggaggtgggcggggccccagggcccactgattccatccaagagggggcatggaaggacagcggcgagcccacgtctggagcttctccctcctgtgaaaggcaaacagaatcctgagatgccaaactcactgttccaaagggaaagggaaagcttggaaatggcgtcacgcaaaacctgcctctcaggagaaccagtctgtttctgaacagagagcttgcaagacggccggccatgtatctccccgggaggcctcccacactctgacagtgtcgatgagcagctgatcctcgcgagtgtgggacaaaagactagggcttgcttttatttttgttcagggacacagagccaacaccaccagctactaaaggaataaaaccacatcttgcttgtttaaagcagtaaaggaacaaaattgcataggccaggaggtgcttttgtgtctccagccgtgacttctggttaaacactcgagaaaaacacaggcttggctttttcttcttttctgtgtctactctatctgacgtcagatgcaggtttgctgagtgccaggtgagtgcctaaagggctgttcccccacctccccctttcacttgcaacgtgcactcagtgcgtgctaattaaagcctcccaggagcctgaccactggcctcattgcccacccaccgtcttctctctcccccttccccctgccctctcctctcctcctcttttaaatactcagcacctcaaaatgctctctggaaaaggcctggccacaggtcctgctgtgactggtgccactttttcctgggcagattctcaaccttggcatcataaccctctaagctgactgagacctggctcagacactttcagttttgtgctccaaacactgagtggtaactttacccagaagttcttagattttcagccactcaagccaggctctgatttccaaaataagtccagatctagaacagtttggggaatgaagggatctggctgagagatgggagttggaacagttgcgacaccgtcagcctcacatgaacagaaacaaattactcaaacaagagaagagcaaggcccaactggaaaagcatgtgggtgagtctgcaaaccaaaaaagtacccgacccaggcctcgatcaatggagaagtttattttgccaaggctaaggatgcacccaggagacaggtctgtgcctctctcccaagatgatgttgaaggcttcagtcaaggggaaaagccggctggagggggcagagggaggagggtgtggtcacatgactgattgctccatgctgcaggagaaaaggagcaggtgggaacagtcagttacctgtttatctcgtgctcagtaaattggcactttccatgagataaggggcacacagagcagccactagtggagatgctgaccctctcatctgcagctgtctgcttagggcaaagggaaaggcagcttcctgcaggactcagctttcagcttttttcttcttggttgagtgaattggggtgtcgagtttttaatcttcctttcacaggtgctgacccaatgaggccaatcatgtgtgattgggaccttctgagtgacttggtggaaagcagggcccaaccctcctgcccaggacgcttgggaaagccttgctggctggacggaggggaaggaggctctcggcgactgcccccagaggggagtggctctccactggccacagcgatggctggagtgagacctgagccccggaaaaacacgaaggtcccaaagccggcaaaagtagacactgagtttattatttgccagacaaggggaggcttccatttcattacgaaaggtcaggagtgctctctgagctgaaggtgaacagacagctgcggtgtaggaaataggaagttttgtccacagttctgattggcggaaaaagcacattgtaaactctctgaggatcgctcctgttccgatttgtgttgcagaagcaggagcaccgttcctggaagaccgtggcaggtgtggtctgggctgcgtggccccggagcctgctgtctgagcctcttctcatggagtgggggtggtttctctggcacctacatgggttaagagggaggacccctggggccttgcgcccatcaccccctctcatcctcactgcctgtgacggacagacaagcagctctcccagctgcagagacaagatgaccacaggagagccagcagaggatgctgttaccagggagctaggacagccagcacacaggcagacggaggcacgcagcctgagtcccagtcagctggaggacatgtgattaaaatgctgctgaatagggaaaaaatcccgggcccagaagttgaggtccctgtgggtggggccgtggggagggggtgcgacccaggccatgcccaggcttgtgatttctgacctcgcgctagtgcatttacgggtaaactgaggctgggagggaagcctctctctgtatggggaggtggtcctctgtccgtgtccgtggtgaggggctgtgcccacccgctgcctagagaggagcaccggtgcttttgtaaagagcagtataaatacacttccgttcagataaaacacaataaataggtggcggcaatggcgggacggcaccacacctgctcaggcggccggacgcacactgcaggagtggctggcgagaggccagccgcagggacatgaaccgaggtcctgttgtttgaggtaaaaatgtatagaaacggttccttgacagcgaaatccccgcttgacactcagatgggcgagcactggcaggggctctgggcctctgcctgcaagaccagaccgtcactggggctgtggctcagaaggactcagaggtggatggatgtccctgcccgaaccagggccgcagatggccccacctgcaccctgcctgatgcccaggcccgggatgccctaggctgggcccacctggacgtccagggtcagttgggggaggtgctggggtcccgccccacctggccaccccagttgctgccgggcagccgcggcctcagcgtgtcctcagccgcaggaccctggagaggggctccttggcgctggagtagatgaggtaggcaccagccgtggtgctgaaggcctcccagtccctgcagccgacggtggggaggctgtgcaccgccacgaagccctcgtagccctgccacctgcggaacagacagcggcagccgggtcagcctgggctctgcggggcagctcctctcccccggctcccacccgcgctgtcagggacccagcagctctgggtcacatctgagcctcttccatccccccgactggcacagcgtggggagatcgattctgggccatgagggccttctcatcttgcaaagcaggaggctgaggcccagaagaggaaagattccagatctcaccaagatcccagcgctacctcctatccacccaagatcctaaccccggggacccccaaacgtgcagttccgagggtcggcctcaatcgtgaggtgcgtgactttccccagggcccccctcaaacacacgcaggccaccacgcaggctggaacccctccgtcctcagatacaggagcccagctctctgcccgctgctctgcggccccacgtcaggggctgccccaggccctcattcttgctctgggcggctgctggccgccagggtttgccttcaaaaggactcatttatcccaggagcttccatttccgaggcgtggagtccccaaggcagggcgccgacatcaaagggcacgagttgtttacatttaatattaaataataaagtatgaaaataaattcttccagactgctttctggaaaaaccgtggtggcttctgctctcacgggaaagggcagggtggggtccccctgggatcccccaacccactccactgcccatctttaacacacttccaaacaaatgggggagaacctggcagggttttgctttgaggacaaatcccttataatgtttattcacactgttcatcttttcttctaaaaattcatatttatatcttttgtccatttttccaaatttaaagacacattttttattagtttgtaagggttggttttctgtcgtgtgtgtggtaaagagtttgtcttttgcttttgaataggatgtctgtttccatagaaagcttttaacacaggtggtcgacccagtgcctttccttctgggcttgtcttcttcatagaaccctgaggttatacaactgccttcagcttttcttctttttcacatttggacttttaatccatataacatttatttttgtgtacaatgtgaagtgggggtaagctttgttttcttccagattacatgaagctaatctcccgaatcatatggagttatcaagtaaaacccatccttttctcattgccttcaaatatagcatttatggccgggcggggtggcttacgcctataatctcagcactttgggaggctgaggcgggcagatcacttgaggtcaggagttcgagaacagcctggccaacatagtgaaaccccatctctattaaaaatacaaaaattagccaggcatgggctaggcgcagtggctcatgcctgtaatcccagcactttgggaggccgaggcgggcagatcacaaggtcaggagatcgagaccatcctggctaacacagtgaaaccccatctctactaaaaaatacaaaacaattagccaggtgtggtggcaggtgcctgtagtcccagctactcaggaggctgaagcaagagaatggcgtgaacccaggaggcggagcttgcagtgtgccgagactgggccactgcactccagcttgggcgacaaagcgagactccatctccaaaaagaaaaaataaaattagccaggcatggttggcccatgcctgtggtcccagcgactagggaggctgaggtgggaggattgcttgagcctgggaatttcagcctgcaatgagctgaggttatgccactgcacttcagcctgggctacagagtgagaccctgtcccccccaaaaaataaataagaaggagatattattaaaaaggtacccaggcccagatggctttataactgaatttaacccagctgtcagaaatgagagaaaaaatcctattcttcagactatcccagtccacaggtgcagttagaaagccctgcagtgtgtatttactgttaggcttcattttaaactggataaagttaagtccccaaaagaaaaccaccgagcaatctaatttcctattatagatgctaaaagcttaaagacaggcaattggaagccagtggcttattcaataattctgcatcatcaccaagtggcatcgggtctaataacgcgaggagatgtctcactataaatcatgacatcaacagtaaacatagtggaccgcaccacgcactcacagatgccaaaggagacctcagccctggcccggatggcccacagcccatcaaacggccatgctcagatgtgctcgttaaattagagcaaggtgggacagctgccacttctgccgccatccaagattgttctggaatctttagctagggaagcaagctacataatcaattagaacactagaaatcaaggggaaatgttctttattctcagaggtaattacattcctaagtcccctgagaatctttttaagaaaagctattagaactgattggttagggggcgagaaaatgattgtcatgatgagcagctgcaaatgaaagttaaaaagccaaccccattcgttaaacgtacgatacttggaaaactcctggaaataaatgagaacaccacagtgtctatgagagaaaaattaaatatcaacaactcccatgttaggatgtccacacgccgcatccctgacagaatccaaaggcagaagcaccagcactcgtgggttgtggctacacccggggcagggccccagctcagatcccacacgggtgcagccagcgccgggccatccactgggcccagccaatctcggaaatgacacctgacttgggactcgctgtgagccggtggcacctgcgagagaaggtgagcccccggggggaagcaaggctctgggaggaggccggcctcggtgagcccttggggggaagcaaggctctgggaggaggccggcctcggtgagccctcggggaagtaaggcgctgggaggaagctggcctcagtgagccctcggggaagcaaggctctgggaggaagctggcctcggtgagcccacagtggggaagcaaggtgctgggaggaagccggcctcggtgagccctcggggggaagcaaggctctgggaggaagctggcctcggtgagccctcagggggaagcaagactctgggaggaggccggcctcggtgagtcctcggggggaagcaaggctctgggaggaggccggcctcggtgagcccttgggtggaagccggccttggtgagcccacaggggggaagcaaggcgctgggaggaggccggccttggtgagcccacggggggaagcagtgtgctgggaggaagctggcctcggtgagccctcggggggaagcaaggctctgggaggaggccggccttggtgagccctcggggggaagcaaggctctgggaggaagccggcctcggtgagccctcggcgggaagcaaggctctgggaggaggccggagttggtgagccctcggggggaagcaaggctctgggaggaagccggcctcggtgagccctcggggggaagaaaggctctgggaggaggccggccttggtgagcccttggggggaagccggccttggtgagcccacagtggggaagcaatgtgctgggaggaagctggcctcggtgagccctcagggggaagcaaggcgctgggaggaggccggccttggtgagcccttggggggaagccggccttggtgagcccacagcggggaagcaaggctctgggaggaagccggcctcggtgagccctcggcgggaagcaaggctctgggaggaggccggagttggtgagccctcggggggaagcaaggctctgggaggaagctggcctcggtgagccctcggggggaagcaaggcgctgggaggaggccggccttggtgagcccttggggggaagccggccttggtgagcccacaggggggaagcaatgtgctgggaggaagctggcctcggtgagccctcggcgggaagcaaggctctgggaggaggccggagttggtgagccctcggcggggaagcaaggctctgggaggaagccggcctcggtgagccctcagcaggaagcaaggctctgggaggaagttggcctcggtgagcccttggggggaagctggccttggtgagcccacagtggggaagcaaggctctgggaggaagccggcctcagtgagcccacagtggggaagcaagtctcttggaggaggccggccttggtgagcccacagtggggaagcaagactctgggaggaagccggcctcggtgagccctcggggggtagctggcctcggtgagccctcagggggaagcagggctctgggaggaagccggcctcggtgagcccttagggggaagcaaggcactgggaggaagctggcctcggtgagccctcgggggaagcaagtctcttggaggaagctggcctcggtgagccctcgggggaagcaaggctctgggaggaagctggcctcagtgagcccacagtggggaagcaaggctcttggaggaggccggcctcggtgagcccacagtggggaagcaaggctctgggaggaggccggcctcggtgagcccacagtggggaagcaagtctcttggaggaggccggcctcggtgagcccacagtggggaagcaagtctcttggaggaggccggcctcggtgagcccacagtggggaagcaagtctcttggaggaggccggcctcggtgagcccacagtggggaagcaagtctcttggaggaggccggcctcggtgagcccacagtggggaagcaaggctctgggaggaggccggcctcggcagctcattacctgtaaataatactgttcaccgagaaggtacgcccatcgaaggagttggccaccaccaggaaataatcttctcccaccgagaaaaactcccagtccagagcactgcaggaacaagtgggtggatattaggacacaacagacatcgccagggaactgggggattggccagaagctacctccaaaatttatagaggaggagccggggccaaagtggggagtgattttctcacagtcacatatgtgttggtctattccaggaaaatgtaaattagttgtttgcttaaaaaaaatttcaaattttattttattttatttttgagatggagtctcattctgtcacccaggctggagtgcagtggcgagatctcggctcacggcaacctctgcctctcggattcaagcgattctcctgcctcagcctcccgagtagctgggattacaagtgtgcggcaccacgcccggctaatttttgtatttgtagtacagacagggtttcaccatgttgtccaggctggtcttgaactcctgacctcaagtgatctgcccacctcagcctcccaaagtgctgggattacaggcatgagccaccatgcctggcctcaaattttaaattatggtaaaatacatataacataacatttcccacctcaaccatctttaggtgcacagatcaggggcattaagcacattcatactgctgtgtggccgcccccaccatccacctccagaacgccttcatcctgcaaaaccgaagctctgcacccagtaaacatcaccccctcccccctccccccccccccccccccagccccggcacccaccacgccactttctgtctctatgaatttgaccactctagggacctcatatgaatggaatcgcacggtatttgtcctttgtgtctgccttagctgagactccagtgactcaaggttcatccgtgtcgcactgtgtgtcagaatcgccttcctttctaaggccgagtaacgctccgctgtgtgaatggacacgttgtgtttgtccatccgctgacagacacttggggaatttcctccatgtggctactgtgaatgctgctgctatgaacaccggggtacaaaagtccacttttaagaggttgaaacaatcagagaaaaagtctcaggctgctggtgcctgctggaggcaggagcttggtttcccgctctggacactgtgcagaaatggcgtcacagtgctgtggcctctgtgcctggtttcttctctcagcattgtgtcttcagctgtgaggtcagcggccgtgaggtcactccaggaggtgcctacaggacctgcaggacctgctcgttcacagatgttctcctagaagcagaagctgtttcttgttgcaaacaaatttgctgtgtcctgtcttaggagtctcacctgaatttaccaaggatgcatctgtgcttggggatggctcggtttgaggggtctgaggagcggctcccctggatcctttcctccccaggagcccacctgccgagctgtcagcgtcagccccacatctcaagatgaggaaatggaggtcgaagccatgcacacgcaggcgtcctgctgacatgcaggccaggcgggtgcctctgtattcagcagcctcagggctgtggccagttcaggcagcagaggggcctcatcccggtgcttccctgcaggcagttgtggggccggcctgcagcaggggctcagacagggccttgggagagggagggatcacagaggtgtccagtgacaggcagggcgggcagagcccatggggccttgggctcctcactccttcggtcagtcagggtgacatctggagccacctccattaatggtgggttatgatttggttcccatgcagcccgtgccagctcgctgggaggaggacgaggacgcctgtgatcacatgctctggtctggaggcacggccgcgggccccgggtcagtgtgaatccgcggggttactcctcagtcggatctgagctctgaaacccagacccgaggaagacaagcggccacgtcggatgtaccagtggtggaagatcctgtccggctgcaccgaggctcacatcagaagccggcttcggtttcaccacaaaataaggcatctagtgcccgattctgcctccaaagcagccctgggtcacactcgctgtaggacagatgttattcttcagaatcacgccctctggcaaatgcccatcatcggacaaatggacggatgaagtgtgactcagccatgagaagggggatgctctgagccgcgcggccacaccaccaacccggaggacacggtgctgcgagaaaaagccaggtacagaggccacggctctacgagtccatttctgtgcagtgtccagaacgggaaatcacagagacaggaagtgggcccgggggtgcccagttgggagggaggggctggaaaagggtgtggggggctccttgtgaggggatgagaatgttccagagttgtctgcagccatggctgcacatatctgtggatttaatagaactactgaatctaaaaagcaaacacaagcgaccatttgaaggcagtcagagccaaggttacacacagaagccacaaaacccctcagcgcccttgaatagggttttggacttggtgaggccacatcacgtctccgggaagtgtagggaattccccatgctgggtagaagggctaggagtttgacttgtgtgtgctgttttgatggtaattattaaacattaccttaattaattggtaagtactttctgtgtttcataatttagttcataaactgtccataccactgtccagtggtgacagggccataagtcgcgagtgtgtagctgtgttctgtcagttcccgcagctttcaaatcccgaggcgtctgcctcatctgtttctagactgggcatcatgtccatgactaatttttaatcacaattcattctccaacttgtcttattctaaatgttgttctaaaaagcctaatgtttgttttgttctcggcgttgacattggatggcgtggattcgtgctggggacacacaactgccaccgccgccccgtgcctgtttctcctgccatggctgccaggccacgcaggggccacggagcccacaggcaggtcaccccggaatccccagtgcccccagcagacaccgccgctggctctttttctttattatgagtgttctttttttaatttttaaaaatcatataagtaagatattagtaagttaacattgtcatcctttgtaaagccaggagttcagaagtaacagggcaaatagggaaagtccttcctggcctgtctacatacccctgcagccctcccggtcctagggtgactgctgacggagagggcactcccttcccgagtcttctctgcacgtccgtgggcacgcacagctgagcggcacacagcagcccggctcgctcctccgcactggggacacaagatttcactgcacctcacccagccctttccacagagcagttcatcttggagactcttcccctcgaagggtctaaaggtatgtgttgttgtgtgtctcaagctgagattagagcccagtgcccaggaggggcaggtgaattgttaccgaatgaaataggagtgcatgaaacccgaggaaacctgggaaagccgcctgctccatcccaggatgggaatgggccagattccagctccaagcttgacccatggcccctggctctgggatctgggtaatacggattcgattgcaggtttattcacagaccggaattccaccccagaggacgccccacactggtcaggatggttgtggattctcagtgcccactgtccaaaatgtggtgcccacgcaacctcctgtggctccacggagcgtgtcggtctggaaccatcactttctcgtacatacagacccaccctccatgttccctggatctcacatctgtctcaacaggccagtctccgtgtcctggtgtttgttgtcggggaggatgcaacatcgggggaaggaagtaatcatgtctggtggcagctggcactggcaggcagcgggcactcgaagcctgcacctcgcacctgtccctctggggcctcggctatccctccgcacgacgggcatgaagccccctcctgcctccactgctcggatgaaaggaggtaatgggtgtgaaggggcagaactccgcacacagcacccggctctgggaaccaaacctgtgtctcagggcggcactgacttccccaggccaggaaagtccccaggccattctttccacaggaaggtccccaggccattctttccacaggaaggtccccaggccagtctttccacgggaagggtggtgaggatgagcctaacggggattccgacatggtgggcctcccagagatcagcccacctcccactggcctgtggaggcgcatacctgcaggtgagaatgtcctggaacttgacaaaggcctgcgcggtcacgttcagctcgtagatgacggagttgatgacataggaatcattctggacttgcatctccacatcgtagctgtgactgtttgccacagcgaggaagatcctctccccgatctggaagacctcccagtctgcagcaccgaacgtctaggaccaaaggagagcaggtgcagaggtgtgggggagcgggcgcagaggtgtgggggagcgggcgcagaggtgtgggggagcgggcgcagaggtgtgggggagggggcgcagaggtgtgggggagggggcgcagaggtgtgggtgagcgggcgcagaggtgtgggtgagcgggcgcagaggtgtgggagagcgggcgcagaggtgtgagtgagcagcactctccctggctgtccccagggctgccacttggcaggacgtgggatcttggcacagcccagtgcccgctgtgctccaggtgccagacgtggcactcctgctggcagcctccttggccacttctccctgaatgttagtgccagctgtgcccagccctgcccctagcgaccatctgtgtgacttgcttctcagcaatccatgccttctcctactccaggccccagtgctgtgcgtcctacgagcaccacctgctgtctcacctcttccaggaagcccaccctgatccctctagtcccagcctcagacactgaagcaacatcaggtacctctcgagttttctcttacacgctttccctggccttgcagtttggctgagtctttcctctggctctgtagacagaagccatctctgggttcctgtgcttgccattcctccataaatcacttaccaccgtcaagaggcaacaggtctggggctgcacacggaggcccaactgcggcacctctgccaccaaccttgagctgcaggactgtctgcatgtggggtccacaaggcggaagcttctgccagcaccttggggataagggtggtggggctgcacggggaaggggaaggctgcttccctggggacagtgtccccacaggccggggatccctgcgcacggtcccaggctgtcctagctgaggacggagccggtcatgctgcggggctgtgtctcttcctgactcacccccgtccggagggccttctgcctgagggacattgcaccaccgggccaggtaagaagcagctctgagagcctcccgtgacagcaaccactgggacgttttctatttgcccaaatcgaccagcaagggcccggctcagacgcccctgggtctgatgcgacctgccctccgcagcaggtcaggcaccctcccttgcttgtatgctcaggacggggctgcccaggcatcttctggtccccctgactgtccggcgcctgcccggccggctcaggtgctgcaggaaagagaaaactctgggcccaacgtcaacgtgcgttctccacgcccagcagggggcgccgttgcccgcccgagcccggagagcctgggctgcaggggagggcgccacaggtgaggacacagctccgtgggcaccaggcaaggtcccaaagcagatccgcagccggtcagaggagcgcacatgggtgagcttaagctaagaaagcaagactcactaggcaaggacaggggcccaggacacctggcggcgccgaaccctcggcgggggcggggccgggggctggctgaggctttcccgggtcagcgcgccctcccctcctgcagctccacgagatgtgactattcctatctgctggagaacagccgtccagggccaccccacgtccttcaaggggactctgagacactctgggccggtgggaccttcagcagcatctggactttggctgcctcacaggtgggcgggggggagtgttacacacaggccagttcactgactcagcagaagagaaacaggaatcatcagactgttcaaccctgggctcctcccacgcctgtgctgaggaaaccaactgagtgggcaaccctcacgtgtgtacacatgcctgcacacacctgcacacacaggcccatacctgcacacctgcatgtatgcatacatacacaaacatggatgtgcactgtgcgcacacacacatgcacgcctgcatgcatgcatacacacacaaacatgcatatgcactgtgtacacacacacatatatgcttacatttttacatgcacagatgcacatgcatgcctgtacacatgtggatacacatgcagatacacaggcctgctcatgtatacatacacatgtatacctacacacacgtatgtatgcatgcaaccatgcatctgtgtccatgtgcatatgtgtatacttgcacacatgcctgtacacaggcagatccctgcaggcacacccatgcatccgcctgcatgacatctacacacacacatgcacccacacagcacagctctccccacattgctggaaaagactgaggacacacgcctccagccctgggcgtccttccagtggagcccctgcttcttagctacttgctgatgctcacctgtgttgaggcagatcctgatggactgccggggccagaacagcctgaaactccctctcagggaaaggcccggagtgcccgccctgtagcagcccagggtgatgggggaccccgagctggcactcagcactgtgtagagagagctttactgcaagttggggctgagccgggcatcacatctcagtgatgagtgaggtgccctccctgcccaaaggagccctggaacgggctgctgcagatgggggaccatggaggggctgcccggggccttgggggcacagaggaagagggcccaaaggcatggaggacggacaggggagttggcagcaggaagcagggaagggtatccaggcagaaggaactgcaggacagacacacaggactgagggagccaggagggctgggcgcacacagagtgcggagcaggggctggggcgggcctacagggcctgggtgctgtggaaagcagctgggcctccaggcaaaggtcactggggagccggaggaggcttttgagcagaacgaggaggtcagatgtatgtggacggctctgagacccacaggagctaggaaggtgtcaggagagaggtgagccaagtgctgtgggggtggggtggggtgggtgccactcctaagatgggaaagaagggtggtggtcttggagacaggcttctggagacccctcagagaactcggtacatccctagggatggagacaggggctttgggagaccactcagagaacctggtatttccctaggcatgggtggcacacgggctgctgtgtgagccctggggaggggcaggtggcaggagcgtagggtggaggtggcggtgctctggccacagccctgaggctggtggagaccctgggttgggaatgcgcgagacgggcagtctggtctggtgggacctgtagcactgcagcctgcctccagggcagggattgtgcccacgtttcatggggtggcagggagcaaactttgagttgcatcttggttggagcccaaggtggggcgtgtatttgttccaggaagagcacgtgtcagctgtgggggtgggcatggaggtctgtccagggcatggcagtggccggagtgaatgctgtgtggtcacctgcctgggtgctgctacgaagcagagctcttgctggagtgcagggccagacaggcctggggggccgggggcggctcagaggctgctcaagtcacccttctgttccctgtacccagcgagggtctgtgcaccagatttagcaaatccagggtccctgttcaatctaaatttcagacaacgaatgattctttagtctgtgtgtatcccatgtaatacttgaaacatactttggcaaaaagaaaaattagtttatctgcaactggctggaggctggcagaacccccacggggtgtcaccggctcctggtcccagcatttagctggccgagtccacggtagggcggtcattgtcattggctattgacagcccctcctccctatgccaggctgtcagaagccccttgcaggttggagtgaacctgtccctctgctgaagccggggccttctcacattcagaagtgaggaggtgccccccaggggctgtgccaacccaggcagagggtgtgcagtgtgggacccccctgtcaggccactcccagattttaagcacattagggactcatagaggagagagaaagaatcttcacatcaaaggccctgccaaaccctggctggcacgggagccaagcgaccaggcacctgctgggctgggcaggcccttcccgccctccctccaatggaattccccagagcctggccctgctgccctggcacggtgcctggcagctcaggagcatcttgctgggatgatggtgcttccgggacttggcagccaggagcacctggagcccccaacagctccctcgagggcgggtgggcacccggtaatcagtggattagttgctgggcaaagaggcccttgggttccggctttgatagggcaaagaaagaggatgcctctgtggtctgggaatgccaggggaggggagggaggcaggatgcacccctggggctccctccctagccaccagaaggcagttccccaacaagccctggttgggggggcagtggcatcctctctgagggtagccagctcaggctggacaagcatcccgggtggccatgggggcagcgctactggatgacaggtgactcccttgagagaactgggctcagcacactccccagccaactcttgggtgccccccgtgctcttcccggccctgcagaacccgcaagcctggcaccttccccaagctgcctaggccactgccagctcctgtgtcagagaagacagaagtcatggggcatagctgccaccttcctggagccctcccgcccaggctctgcccagccccttcaggctgtcctgggcagtgctgacccctcatgccacccccttgacagatgtgcagatggagactcagacacagccaggcctcatgagggtgcttaggggctcctgcctgtttttctaagcaccacatggctgcctgccgggcacctgtccccagagtggcccccactgtatccttgcctacagcacctcttgcccttccatggccatggaagcgagtacacacacgtgtgcatgagtgtgcatgtacatgtgtgttgagccatgggcgggacccttgggaagtgtgtggcaccaagtcgggggcccagctgtgacgaggggtccttactaacatggtggctgctgctggccttgtgaggaccccacatgccgacagctgcaatcacagaagcaccaagctttggaagctgcaacaccttctgaggtctgcagcaaactcacttagaagccaaacctattttggagtccacatttggtgaccgcgactgcacggcctactcctcgtcagctcagggagcaggaccctgtgcctagacttctagggacagagctcactcctcctttggtccaagctggggaggcccagtcattggaggcctggtgtctccaacctggaagaaagttgttctagaattcctggtgggatgggcagaaagactttgagggcaggcggaagaatgggacatcaaaccaccttccccagggtgggcagccagctcctcactcatatctgccctggggctgcaaagtcctgccatgcccaccgaccattcccttggagcactgtacttaacctgcagtgccctgggaatgcgcccaccctgtgtttctgggagaaagtgaggtctgtgtgcacagctcctcaaaccccacctgcaccccacacccccgcagacccctccagaaagggcgcctctctatggcacacacccactttcaaagcatctcggcttcacccgcttcaaagctcacgttcatgaaagacattgcaaaactcaaaccaaacagtaaacaaattaagacatctctaggacctaaaaggatttcaacacaatgtgagaaatgttggcaaaacatgaaagtgggctttgtgagttttgaggaattactgagttttgaaagatgaggctcaggccaggtggagaggaagcccgtccatgtgtgcgtggtcccagcgccttcccagggccctcctaaggcaccttcagggcctgggccatgatggcgcccccagcagccaggtccccgttcccggagttctggttctgctttgggagctgcagccgtgcttccttctgtctgctgtggtcctgctctagcccctgctcttctctgatgtttctttcaggcggatgtcacccaccccttgggacttcgccatgggtcgctagcccagaccctccccttggttccggtggttccatttctgcccctttgctgctggcccccttctgaggatgcccgtgcatctccaggaccactgctccagtccttggtgtagatcaaagctggccttcacacgcggcctgaaaatgtagagtggccgccttctgggctgggctgccacctccaccacatcacccgtgacagaagccccgtgtttttcggtaaccacgttccacgaacacctcccgactgccttccagaacacacaaagatcaacgaagctcagaatccagtcccgacgtcatttcatgaagagcaggtagtccatcaaagggatgggccccatgagtgaagggctgagaccccaccatggtgtgaggcgtcccaggcactcccgtcacggcccaaaccaggctgcaggctccatccccatggggcaggcacagaggaggcgattcatgtggacacagggacacctgtggacgccctggctcggccgcttaccgccgtgtgtttgtggccaggtccctgctcctgagcctcagtttccacacctgtgagatgggtctgaggtggaatcgccaaccagctgaggatgcgcagccacagaccaccttccagaaatctccaaaaggctttccaaaacaggaaaacaaggaaggctgccatcagcaggaattccagggctttcagaatgaggctgtcaggagtgaagggagctgtgctccacatgcagggcagtggccagggctgccaggccttgtttatctgggagcgccaggctgcctgcctgcacctggtctgggcacctgaaggcagagctgctcctgcttagggtctgtggcaactgtcctcctcagtgggtgctgctgggagctcctctgattcctggtgggcggcttctggcctcgcctcttcacccacggtgtagggtgtgggatggagatgcagggcctctgctctccttctcccctcccccaagcagcctgggttgtacctccactaataaacaccaacacccgcgcccagggtgggttcggccacggggcgattctctgagtgacacatcaggatcagcttcgtgtggtcctgaccttacggtaatgtcagcccccagagccaggggccgggctatggcaccacccacccaggcgatttctatgtcgggatgaccaactgtgccatccctggggcagtcccccatgccaggcaaacattctcctttcatgcttaaaatcacaggacgggttcacctgcttcgtccttggacctgtgatctatgtacgctgcttttcaacaagtttctagttgtcccctcctgggtatggccctcccctccttccttcccagaggaagaaaacacaccagctctgcatgcgagaacgctcccagctctcccatcttcccatcgcaggagcccctcgctcctgcaccctggggctttcggtcctgtcccacctcagcggctgctgcacaggaaggccgtcctggcctggcccctgtgtctctgccttcctcgactcctgcagtctgtgcttctgtcactccttcagcacgccatccctggacacactttgtgctccgtggactccacagcccccaaaccccctcttatgccctccctgaccccagaccatctgggctggcttctctctaggacacataccagttctcattccagaactttccttatggtcatctttgggtggagccaccacttccagttctgatcttctcattctggttgagtacctgggcttgccagtgcaccccccaggaacaccgcctagtccagggctcccacaggtctcagactgacaggagactgggtcatatgaccagcactagccaatgagctgtgagtacacgtgacacagggacaagctgggtcatgtgactggcactagccaatgagctgtgaggacgtgagcacaggtccagctaggctgggtcatatgacaagcattagccaatgagctgtgaggacacgtgagtacaggtccagctaggctgggacatgtgactggcactggcccatgggctgtgagcacaggtcaggtcagccccttcctgctgcttcccaccgtgtgtgctccttgtctgacttgatatgagaactaacccaatatggcaggaagccactgacatgtgggagccgtgcatggcagtggccagcgtccttgtcctgcgggggctctgtggacatcactcgccttcagaacactgagccctcctacctcctgatatccagggctgccgatgggaaatcccaggctgccgcggctcctgtgtgctttgaaggtaactttcctttgctctcgcgctccttgggctcagcgccctttcagtctgatgagatctgggcggttttcttcaagccttctctgacaattccatcactgtcctcaccctcttcttttttttctagaactttggttagccagatacagactctcctggtttgattctgtctcttttcattctacattctagaagatactcttaactttatatttcagtcatgttaatgaatgtcttcttttaatgccagcaattgcatttttaatgtccaagctctctgtctcattagtagcattttttatttcgtaagtgcagtatcatcttgaatacttctgaagacaagtataacttaaaaaaattcctttctgtttctagagctagctcagtttctttcagcctttttctttagcctgactcctgcagttttcaggatttttgtcaaacatccggggacccttagctggagaggatggcatgggtgacacgcagctggccaggtacgctctggggcactggggcatcttgagcaccttggtgcagtgtcgtgaagaagacactgtaaattggacttggtgttatcacaggggctttaggatcacggtgttggtagatctaggatgataatctccaaaacgcactccccaacccactgcagggatcctttctcttgtcacctcactttgtgatttagaatgcaggacctccaggacagcagcctctccgtggcacaacagctgttaggagaccttgcctagttgacgagaaagtcacttgtggtgcctttccatccagggtgcgcgactctgctctcaagaccccctggaggcccgccccctgccccccaccagctcattcgttagatgattggaagtgactgcctacgtcttctttcaggataaagcctcaagtcctgcaactattccttgtgtgataacgtttcaaatcccttcctggttctggcaaagctcctcaaacatgctccagtgtgctggggctctgcatgtgtgagcctggggccagcagggcgcacgttcatgtcagggcaccagtatgatcctgatgacacatgactggtgtggagccccgggtgtttccacgggaactgctgtcggccggattgctgtgctctgcagctgtgcccaagtccccaagccaccctttcgttgctgctcgatgtcaccatttgcttttgttgttttttttttgtttttgagatggagtctcactctgtcgcccaggctggagtgcagtggcgtgatctcggctcactgcaagctccgcctcccgggttcacgccattctcctgcctcagcctcccgagtagctgggattacaggtacccgccaccatgccaggctaatttttttttgtatttttagtagagacagggtttcaccgtgttcaccaggatggtcttgatctcctgaccttgtgatccgcctgccttggcttcccaaagggttgggattacaggcttgagccactgcgcccagcccaccatttgccttttgagccactgtccccgcgtatcgagccctccttgggagtcccaatttccagcccatatcacgctcttggccccagcttgcagctgctttcgcatctcaacctcaccagcctcaagtccaactccaggtcaatgattactggtcagaggggccattcctgctgagccctgtggtcaggctaacccatgaccgaaggctcctgaaccctccttcaggtccgctgtccgcacaccagcacgtggccaccagcccaggacacccttgtagtttcccagagtcttagcagcatgcgtgttgtggtgagaggactgtgcagggaccagtaagacaaggaacttatgctcagctctgtcccgtgccacatcaaaccaagtgacaggccgcattgcttggcttgatcccagttctgccacgggcaaagccctccaccgttctgagcctctgtgtccttgtggataacagggaccagtggcagcaagcccctctcaaggtgctgtgagggtgatgtgggcggatgcgggcagagctcttggcacaggtgctctacagagtcgaggctcagccagtgtgagccgctaccaccacctacctcctgaggctgttaccaaggccaatggctggaaggaatcttgctcacccccaatcccagtgcactgagcctcactctgcccccgtggcaggaggctcatcccgcctcttcctggctcccaggcacgctcacctgttccatccacagcactagcgagctcaaggtgtgttccttctggcactgctgcctcctcacctgggcgcctgcggctcatctgggcggccacagcagcctcccaatggctcactccctcccagccaccgaccagtcattatcgtgcagccctgtcaaccccacaagggcaggcttcacgtttcacttgcagcctgtggctctgggtggtgaccctgctgcctactcccagccccactgccctgcaggtaccctcccaactttcccagccctcacttcctcctggtgagggctgggaaagtggggagggtgctccctgacatctgctctcctcgtgccctgaacatccacgtaaagctgcccttccccactggaccatgagtgcccgaagggtggggcggtggtcacctggatgacgctgtgccccagcctgccagagggctgagcacgtgggagtcccggagcaattctctgcacgcattaaggcgtgtgattggtccctgtgagccgcggctcctggtccggcccctgcgggcttctcaaggtggtcacactcccggtttcctaagctgctcttactcctgctgggtggaggggctccaggaacctgcgactgctgaactccatcttcctcccttctgttttgaagctcattcccatgtgctacctgcaggcttgctctaatgagatgtatgtatggaatgttatgtatggaatgttccagaatgccttcaatcatttcagccataaagccccacccaccacatgcacagcttcttgtctaatgcaggggtagcctggcaaggcctgactgttgtcactgtttttccagactccctgatgggggcggggggtccgggcatcagcgtctgccatggttctgcccctgtaccagcctcactgggacgtggcatgggggcagctcacgtggcaagagtggcctgggttagtctcactgcctcgggtgcagaaggccctgagaacatttctgcaggggaatgagtcgccaggtcagggggcacagaagattccagaaggacaccagggaggtgatgtcttatgagaggcacgcttccagcaaacagtgggagtgctgtcaccggcgctgcagagcccctgagctgcctcctccggggaactgggctcacatagaggctgagcccgaggtgggagatgcgcccccacctgtctcgtactccgcacctctgctccggtcacagtcctcagcacacttgctgggagcaggcagcacgctgtccctgcccctggaggtggcctaataagcacctgttgctgcctcaactcaaaggtctcgtggtggctggaaccagccaaggggcacttgaggcctggagaggagcgccacgtgctgccccgacccggcccccacgctgccctgggtcagagccaagctgcccagctgccccagggccagggccctgacgaccatacagactcagattagaccgcgggagcttccaaggggagggagggcctgttctgagcccgggggctgctttatggagaacaccatgccagggtggggcagagccagggtgcgcctcctgccttatttccaggcacctggactgtccctgggcgcacagaggctctcaggcaagaagggctcagacgccaggcaaggatcctgtgccgtccagaggagcaggccctgcctgggttttggggtcacgggtgcagagcagcactaggtttggctctcggtggacccccagcccacatcacctgtccagcaggtgcaggtgacagacgcagtggccagcaatggagagccggggctcatgcggggggccttaccgggaaggactggaagagctggaaggagcccaggagtcggatgtagaggtgcgagtgcaccttggtggaggtgccgttgaaggtgttggccaccaccaggaacgagtagggccccacactgaagaactcccagtcgtaggcgccggaggtggcgatggtctggttggcctcgaagagccgggttgccgggttccacttgtagatgacactgtcgatgttgtggttgtcgcctggaaccaagggactgtgctgggggcagggaggcagattccacagccccatggcagccccgacggaggcagagcccagtccaagtccctccccgaggaccgaagacccacgaggacaaggccaaccgctggggacatcctttcttaccttgagcctcccgccctcagccccttgctgactgcacctctgggccatcacaggtgctattcccatatggaaatgcttggtggcccccaccgcccttgggacaggtgtacatctccatggcctccccgtgtcctggaggtggggcccaccgtgtcctggccccgctgcccacggctctccagcatccccacaggccaggccttcccacgcactgccacctctgcccggaggcccctccctctcaactgtggagctcccccattgggtgggtcgtgggctcaggggagtgcagagctgtggagcctgggcagggttgggtctgggaggtcctgcaggcggagagatgcccccagacccaggccggctcgtggagctacacaatggcaggtactcatggtggccgctcagggcagtgtcctggcctggaaagcaggtgtcccggtaccttccaggccagtgctcctcactgtctctgctggcacaaggcgggacagctgcctgtcctcaggaaacaaggccatggaggccatccagatcccatgtcctcggcagctgtcctccaccacacacctggccatgccaggcaccaggccagcatccctgccatgggcctgggcccaccacccaacatctgccctccctgtgctggtcagacctttcctgctgggaggctgcttagtctgtcagtcagtcattgaggtagtcagtcagtcagttgtcagtcagtcagatagtcagtcatcagttagtcactgaaacagttagtcaagtagtcagtcaggtagtttgtcagtcagccaggtagttagtcagttagtcagtcagtcagccagccagccagccaattagtcagtgaagtagtcagtcagccagtcagttaatttgtcagtcaggtagttggtcagtcagtcagccagccagccagccaattagtcagtgaagtagtcagtcagccagtcagttaatttgtcagtcaggtagttggtcagtcagtcagttagccagccagccaattagtcagtgaggtattcagtcagtcagtcagtttgtcagtcagtcaggtaggtagtcactcagtgaagtggtcggtcagttgtgtcagtcagtcagtaaggtagtcagttggtcagtcagttaggtagttaataagtcaggtagtcaggtagttagtcaggtagtcagttaggtagttaataaggtaatcagtcagtcaggcagttagtttggtagtcggtcaggtaggcagtcagtcgtcagtcagtctgaggtagttaagtcattgagatggtcagtcagtaagtcagtcagttaggtcgtcagtcagtcagttcagtagttaggtagtcagtcatcagtcaggtagttaatcagtcaggtagtcagtcatcagtgagtgaggtagtcagttgtcaggtagtcatcagccagtcagataggcaggtagttagtcatcagtcagtcagtcaggtagtcagccaggtagttaatcagtcagccagtcagtgaggtagttaatcagttagtcagtgaggtagtcagtcagtcagtcagtcagtcagttagtcaggtaattaggtagtcagccagtcagttcagtggctagtcaggtagttggtcagtcatgagtcaggttattaatcagtcaggtagtttgtcagtcagtcagtcaattagccagtgaggtagtcagtcagtcagttcagtagttagtcaggtagccagtcatcagtcaggtagtcagtcaggtagttagtcatcagtcaggtagttagtcagttgtcaggtagtcactcagtcatcagtcagtcaggtagttaggcaatcagtcaataagtgaggtagtcaggtagtcagtcagatagtcagtcagtcagtgaggtagtcagtcagctagtcaagtagttaggtaatcagtcagtcagacagtcaggtagttaggcaggtagtcactccatcagtcagtcagtcagtcagtgaggtagtccatcagtcagccagccagccagccagtcaggtagttagtcaactaatcattcagtcagtcagacagtcaggtagttagtcagtcagatagtaagtcagttaatgagttagccagtcaggtagctagtcaggtaatcagtcagttagtgggagagtcaggtaattaggtagtcagtcaggcagtcaatcaatgagtcagttagttagtcagccagtcaggtagttaggtagtcagtcagtcaggtagttagtcaggtagtcagtcaggcagtcagtcagtcagacaagtagtcagtaaggtaaccagtcagtgatgtagtcaggtagtcagtcaatcagttagtcaggtagttagccagttagtcatgtaatcagtcagtcaggtagtcagtcatcagtcagttaggtagttagtcatcagttagtcagttaggtaattagtcagtcagctagtcagttaatcaggtagttaggtaatcagtcagtgagacagtcagtcaatcagtcagtaaggtagtcagtcaggtaattagtagtcagtcagagagtcaggtagtcattcagatagacagtcaggtagttagtcaatcagtcagtgaggtagtcagtcagccaatagccagtcagccagtcaggtagttagtcaggtaatcagtcagtcagtcagatagtcaggtagttagtcattcaggtagtcagtcagtcagtcagtcactctttgaggcagtcagtcagtcagtcagtcagtgaggcagtcagccagccagccagtcagatagttagtcattcaggtggtcagtcagtcaggtagttagtcagatagtcagtcagttagccagtcagctagtcattcaggttgtcagtcagccaatcaggtatcagtcaggtagtcagtcagacagtcaggtagttagtcagtcagtcagtcagtgaagtagtcagtcagtctgtgatgtagttggtcattcaggtcgtcaatcagtcagtcaggtagttagtcatgtaattagtcaagtagttagtcaagaagtcaggtaatttagtcaatcagtcatcaggcagtcagtcatcaggtaattaggtagtcagtcgggtagtcagtgagttaggtagttaatcagctagtcagtcagtcagtttcagacaaggagggaggctggcaggtattctgtgctgggagtcagtctggcagtccatgtttctggggtggctgtgctgtgggcaggtgccccagggaccaccagtagatgtccctcccccagacagtgaggaacggtccagaacgcatgttcaccctgtgctgcatgtggcttattgttttctaataagatacacattcgccctgcctgcaagtctcgctctgcccctggaatggttgcctcccggtgtgaaggccactcctgccctaccttcccggtggttggccaccgccaggaagtgctccccatccacctcgaaggcctcccagtctcgggcgctgtgtgtggcaatgctctgatatggggtaaacttcagctttctgtggctccatttgtaaatgacagagaactcctgacccttctcatctggttcaaaattagccactgccaggaagatctgaaagagagtaaaccgggaccacgtggttctgcttgggtcggtgccagcggcctggtttctgaaggcttctgaacatcagcatctctctccagatccacggctgctacgtggtgcagggacagaggaccgaggcccccgcattacaggtcatcatggtggggtgggcgcagagccggtcattacattcatcaagacccttgaaaatgtccatattctttacccaatatttccacttctattgctatctgaaggcaaaaacacaaaagccaaaattcccaaattcaggaaaagctttatgcacaaaaatgttcttcataacccagatgaccagaaaaacgcatcacaacctgctctcctgtgttatgggtgtgatcaccacgcaaagctgtgtcagggcaatgtgtgtaaaacatgaacatggcgcaatgtgcccagggctcatagtgtagctgtgtgaacatacagaatgaggggcaaggtgcatggttcatggacgatgtgcttggaggcaaggacgccacatgaacctacgtacttgcttggatgatggaacaaaatattgtcccctttgcttttctgaattttccaattgttctttgatgcaaagttttttttataacaaaaaattaaaaccttatgatgtcatcaatcaaaaaaaaaaaaaccaactagttattcacccgccatgctggatgcaaatgcagcctgcatgagggtggctgtaagccacaggagagcagtttccatctgctgtgttcactgctttagccctgtgtccaggcagggcctggtgggcctccttggcacattgtaggccagtgagtgactatttgggggcagtcaggaggtgctgtctctaggacatggctgtgtagagtccagggagtggacggagctgggaagaggaaaccccatccttcccattgggatgtcaaccatctcccagacccaccacctcgaccctctgcccagagcagccctgacaggaaggtggctgtcagcctgcgaggtcccacccatggctcccctgagcctggcctcagccttgcatgtggacatcacgtgtcctcaacatttgaggaaaggaaggatcaggaatgtccattttctagtgtctttctgaaacgatttgtgggttcttgaccagctcatgtaaacactctcaacaggttttaaatgtagtgacgaggggtctatgtagaacgagatggcatgtgggaaatggtctggtcgtccgttttgcgggagccaagcagactgcctcaaagtcacatcctggatttagggtggtgggctcacgtgtgcgactctgtcagccttttaccgcctgaacgaggtgacaccgtgagaaactcctttacctgcagaatcagtgtagggggccccgcctgtggactcggggctttccaagagaaaggggatggagaaagtcaccgaacacagacttgcctttttcccgatggtgaaatgcctccaggcctgtgcttggtgcgtggggatgttctgatatgagacgaacttctcttcggtccacttgtagacggcggatgtggctttgcgattggctgtggccacaaagagccccacctgagggatgcggaacacctcaatgcccagggtctctgagttggtggacaagttctgatgctcctccacgtagtccagtctttctttggcttgtgatagaaacgttgtgactcggttaagatttccgagaacggaaatccagagcaatcctcgcgggagcgcgattcccaagccccaagtcacaagccacgactcctgcgcctcagcctcgggcatcagtttccacgtttcgctctcacaggaaaggcctgtcaaagggaggccactcactgctgccaggggctttgtgatctgtgcagcccccagtgaagtttacatgttgtgggttgtggccttgttaaaaggctcactgcttctacggcaagttgtgctctcgataatgtgaaagagagcagctcacacacgtgctgggcggaacccatgcccatttcccacgggtaacctgtctggagcatctatcgccacctccactcacctccccagcagcgggaacggactgctgagaaggctctctgtaaaaataacctttcaggctcgtcatctccttggatctcatctctgatctagcagacagggagggtgtgggcagaggcggcagccgggccaccctaccaaggaggctgcagggaggcaggcattgtcttcccatggtttgggaaggggtaccacgcgatgcccagccctgtcagcccgtgtgtcatgccctggaggttcacatttccaattgagatgcacaggctcgaggctcctggtggggcagtttcctgtcctaagtggtgcctgccctgaggagggcctgtggctgagtcctgtggctctagggagggcagtgtcctgcccgctgcttgctttgggggtcaggactgatgctgcctctcactcttagaagtgccccagcctgacggccaagcctgaggtcattcagaggtggctgaggtgccccctctcctagcctccactcccagtcacactgtgccagagtggccctgcatgccaacgccccgggtgcagggctgcctcacctgctaacacggagacccactcgttgccaacacacagatacaggcccttccggctggcatcaaaccagaactgggcgtcttccacctcggtacacggtggctggggtcccagcgtcactcgaatgttggtttctgaggggaagaccaggaagatgagtttccagcaagccagtgcccccaaaggaagacgacacaggaagaggcccccaaaccaggctgccctgcctcagcctctgcatgcgggcctggaagggcccctgcaggcaccttggcacaagcctgccacatcacagacggggaattgagaacctggcctaccggtgacgaaggacatcatgatgccccctatatggtcagcccaccctctgtccactctgaaaggcgtggctttccatcccattgaggcagaaaaggcctgctcctctgagagtcctcagcgattgcacagggcatggtcccccctcaggagggagtccctgttgacagtggtgtatcttaacgacggcttggcttgaacctgtggcggtttgatctcatcacttccagtaatcacaccccaccatgggtcctaattctgccacctcttgactctatgtgggacatctgtgcacctgccagccggtgctggccagcggtgtgacacagtataccatgcggcccggatgtgttggaggtgggggctcccctacttggtaaccgctaaccctgaggctcgggggctcggctgttctccacctcactgcccctcgggttggctgagagcagtggggatgcggcggggaggggcatttcagattctccatggcaggagtgtggtttaaataaatacagtcacccttgtaacttcacacaagagaaaatcaagcggggaggccctctgggccgggggatcgtggaagacgtgagtgtagggccagagtgggcccgactggggcgggctggtctggatgatggtgggacagaggcggggtggggagaaatggcccaaacgctgtccttggggggcaaaaggggatgagggatgtcagatagctctggacagactttctaaagtaagttaggcctgttttctgcctggggtccccaggaaggggctggatggctgtcgtgggagtgcttggagggaagggcaggatgacactggcctgtctgatggtgccgcctgccttcctaggggtgggccccgagtatccccctggccaatatgaccgctgccccccgtagcagtgatgaggggggcaggcacacgagaggggctgagagctgagccctgagttcccgcctggtgtgaggccagggctctcgcatctgcctttggtgtgggggcgggtggcccccctactaaccatagggatattttagcacctcgttatcttctggcttccccgtgagagcctgcaggacccgtgggatggacagcaccgccagcggggcgttcctgctgggacacagccttggggtggcgtctgagcccggcagcaggaccagttgcctcaccagtccctgcagagagagggacagctccttcaggcccgcgctgctggggaaggacccgctgaggaggcgaccactgagcttggcccatccagagcccggaggaggctcgggtggatggaatctaagcttttgcagagctaactgggaagagtttacatgatggttactgaggaggccatgggagcaatggtgaagaattgccccccttccgagggaactgaaccacagaaggggttttttatgtgaacttagagtgactggctactctgctcatccaacagcccatccacccatcctgttcatccatgcattcatccatccatctgtccatccatcagtccaatccattcatccatcactaatccatccatccctccacctacccatccattcatccatgcattcatccatccatccacccattcatccatcactcatccatccatccctccatccacccatccattcatccatccattcatctttctctccatctgttcatctctccacgcatccatccctccatccatccattcatctttctctccatctgttcatctctccacgcatccatccatccatccatccatttgtccatccctccatctgcccatccatctgtcaaaccatgcatcaataaatattcagagcatctgctatgtgccaggcatggctctagacactggactcagcagggaacaaaggcctctagcctcatggagtgaggtccccactcacacgtgagtggagacacaggcaccgagcagacacccagctggcctgagagcagcaggccctactgaggaaagacagctccggggaaggggctgcagggcagagtgtgggcatcagctcagcatggtgggggcagcctgaagaggaccgttgggcagggacccaagaccatcagggaggagggtgccaggaggaaacagcaagcgtgaaggccctgtggtagagactccacgcacgctgtaccttcttttcccagttagcacgtccaaggatctgtcaactagagcagtaggacaactggcctggggcagtcccatcccgcagcacgggtgttgggaaggcagcccctccatactcgccatgaacaggcctttggctctcctccggctgccgacgaagaatcgagctcctttcactgacagggtggctgggaagggcacatcggccattctgaaaatatcaaaggactgtgttagggccataggagagtggtcaccccagtttactcacagaaggaacaggaacaagcccctcactaagcagcgtgcatctgtgctgtggctgccacacaaaggatggcacacagggctgatcgcctgcacagctctggagcccagtagcctggatcaggctggggcagggtttctccgaaggctccagaggaggacgcttcctcgactcatcagcttctggtggctgcacgtgctccccgtgacctgtggccatgtcgctccagtgtccgactctcccagtatctgtctcctggtaaggatcctagtcacactggagcagggcccgcctcactccaggatgatctcagcttgacttgatgactgcaaagactctgtttccaggtaaggtcacattcacgggtgctgggtggacatgaattcggggggggcacttcaccccagggccagggcctcctgcagaagtgcgtggtgacatgcttagtggttcttccctatctcatggtgaacgtgcagtggcttcgacctgcacagggtcctccagcccactcaccctccctccactgagctcctgcaccatcacccggcctggggtgctgggacagatggcttcaggacaggaaggaggctggtgacccatgagggtgtcaggagcaggcggtcttgacgagtgcgtggaggctgaactccggagatggagcaaggtgggtgcccgctgagggacagcgtggctagagctcctgggcggaagagcaggggtgccttcgggctcgcctcccgcccacgctgccactgtctcttgtaaaacacctgctccttccagtctttgccatctggctgcagctggccgtggtgagctcagctcctgccctgctgtcccagaaagccccgtcctctgcacacagctcggcctctgctagggtccaggctgctggcccccaagccctggcctgtaccctccgtagcagcctgccaaggggttaagttcttccgtggccacaattggttccaggcctgtgactccccatgtcccaccatcttccccaggaagtccacttttaaaacattcggggaacattcctaatcattatgctttcgaccctgatttcttcctttctcctgatgaggcaggtgaacgtttgtccaggcctcaggcgctgccgccacgtcattcctagctgctgtggcaaagccagaagtcaggcagcattcacgtccagccaggactttctttacggggtgggaagctgctgctaggtcaggttgtcttcagcctgcacagcacgtccctgggaggcttccagctctcaggacctgagaactcatcaccgtcctgagggccctaaagagtttggggtatggtgggagagaggctctgataaaagtgtgtttaagctaagtgcataataaaaatatttatgcgataagtttcataacaaaacagaagatcctacctttgaaagtaatattcgaaataatttaatatttaatagatttaatataaactggatcatttgcaattaaaaagacagaagcgcagccctgctccacagtggtagatcctgacatgggtaaccaactggccgagctaggggactgaggactcctgtccaggggacctaccgtcaggccacaaaccaggcgacggcaaaaacgagaaacgaactcggcttccaaaagcccccattgtgtccaaggctacaaaggataatcttgtactcatttggagtttctgtcaacatctgctccctcgtccacgaggaacctgccatgtggagtcacggagccaggcctcggcctccagcctggaggttggggaaggagttactctgacttcccgctgctgcctgttgtgatgttagcgccctccccacagtgccggtcccctgccaagtcccctgagctacttctggaaaaggagtgcgcttggtgtgatcgcccttaccttgttctaagccactgactctgatgtgcagcgggttttgtgtttaaggcgtggagaaacattaaaatcggggttttgacaggagtgtgcttcataaacgctccgcgggagaggcccattccccttccagcccgaatccagggcatcactcaccacctgttctcgccaatgtccactctgcccacagatggtgagcctgcctcaccccatgcagccctgcagaggctggcgcggacgctgacctgacctcccatggtcagcccctgcctcatgaatggctcttgccccctggtcggctcctgccccgtggatggctcctgcccctccaccccatggctcctggcccctggtcggctcctgcctctccaccccatggctcctgtccctccaccccatggctcctggcccctggtcggctcctgccccgtggatggctcctgcccctccaccccatggctcctgaccctggtcagctcctgccccaggacagctcctgcaggtgttgctcggcgagcacggctgaaggatgcctggcctggcaggactctgaggactgcaggtgcaccctccccgggtgggtacctacatgtccaccgggaggccgcagtccgtggtgagggagaagacgcctgcggacacagccaggaccagtgtgtgccagcggccatccaccagggccgggctgcggaaggacactcgggtctgccaggcgccggccgtgtcctcgcgaaggaacaggaagtgcagctgggcaggtgacaaccgcaggccgagcagcagcaggtcgctctcctctgccaccaccgtcagcaggtactcgttcctctgtggagagcgggccaggctcaggacggggctgggggtaggggtcgggtgcgggggcagggcagatgggaatggcagaggtgatgagcacaggtggtgagaggagcaggggctgactggaggggcgaggtgagggggcgcggtggatgggaagggcagggtggataggggccttctaattagccctctaatggggagggatggggttgatggagcgctagggctggtgccaggggtggagctggtgtgagggggcggggctggtgtgtgaggggtggggcttgtgtgagggggcggggctggtgtgtgagggggcggggctggtgtggggcggggctggtgtgtgaggggtggggcttgtgtgagggggcagggctggtgtgtgtggggcagggctggtgtgtgaggggtggggctggtgtggggcggggctggtgtgtgtggggcagggctggtgtgtgaggggtggggctggtgtgtgaggggcggggctggtgtgtgagggggcagggttggtgtgagggggcggggctggtgtgtgaggggtggggctggtatgtgacagggctgatgtgtgagagggagggctgctgggccaggggcaaggctggcgccaggccgtagggaccggcttagtcaggagcacgggtccatggtaaaacccaaaggcacccccacacactaggatggctaatgcccaaagaacagaatgtgttatgctggcgacactgtggagaaactggaactcttgcgcactgttggtgggaatgtaaaatggtgcagccactgtggaaaacaggatggcagttcctcaaaaagttataaacagaacgaccaaatgattcagcaattccacttctgggtccattctcaaaagaatcgaaagagatacttgtacacacatgttcatagtggcttactcacaattgccaaaaggtagaagcaacacaagtgtccacgaacggatggatgggtaaacgcagtgtggtccaaccacacagtggaatattagtcagccataaagagggaaggaaatgctgacacatgctgcaacatggatgaaccttggggatgttccacttatatgaggtcactagactggtcacattcacagagacaaaaggtagaatggtaggtgccggggctggggggtgatggggagtaagtgtttaatgggtgtggagtttcagtgttgggagacgaagaagttctggagatggacggtggtgatggctgcacaacaacatggatgtcctgaatgccactgactgtacccttaaaaatagtttcgatggtaaattttacattacgtgtattttaccacaattaaaaaacaagaacgtatacaaatgcggtgtccaccaagacctcagagctttttggcttcctttccaatttgggttatgtgaaacaaagcacttgattatacttatttccaacttagattccattcattcctagcccaacacaattaaagaattgaaagtgattaagcctgaaaggtaaagcaggtatgaaaacagttagacagcatacagtcacgtacggccagagcctgtttcagttgacagtggacagcacaggggatggtggtcctgtaagattgtaacactgacgttttactgtatcgtgtctgtgtttagaaacacgaatacactgtttgtacactgcgactgcctgcagtattcccacagtagcgtgctggaagtagctgctcactgcaacctctgcctcccaggttcaagcaattttcctgactcagcctccaaagtagctgggactacaggtgcacaccaccacacccagctaattttgtatttttagtagagatggggtttcaccatgttagccaggctggtctcaaactcctgacctcaggtgatccgcccgcttcggcctcccaaagtgctgggattacagataaagcaaagttttgagctttaagaccagaaggatcaatttctatgtttatcaaaaaaaaaaaaaggaaaaaagaaaaaaaaaaactatctatggggctattaggtctttttccattggaagtggactttctgttctgcccaactttgcttccactccaagctccttaccctcaggttgggagacagagggactcttctgtggaaggaagccctggtagctcagactcaagagttcacagtggcagagtccagccctgtcaggcttcttcctgcagccgcttgtgttccatggctgatggagaggaggggcctgcccagctgcagtggctgttcacactctggccccctttccgggcggtgctgggcttctcccatcctcaggctgctgctcctgccagtgctccctcggcgtcctccggcacagacctcagcaacactgacttctgggcctggttcctacccactcgcattttgggcccttgggtgatatcttgccattaagttctgtcctaaatggaacccatgggtttttctttttctatctggtaattctctctgtttctatttgggatttagggagatttagaaactatgcctcaggtagcaccatgtctctaggatccactcctccctctcaaaacaatccttgattctagtaaatgaaaattcatagcaaaaaggaaatagaaagacttggtttaaaaataaaaggtttctacttaaaccccacagcaaacactgcgtgtagtggtgaacctttgacgctttctcatgaaagtcaggaacaatcaaggattcttttaattttattcagcatcatcctgggtgttcaaagtaatgttgccacaggaaaaacaatagaaatgggagttttaaagattggaaatgagaagttaaattctccttattttcaaatgatgagctcatctacatagaaaaatccaagaaaatcaatgacaaactgtaagaactaataagagaacttgcaaaggaaaggagctaaacatatggtttgatatgaagacaatatatatgtaaaaaatttatatagacatatatacaggatttatatactaagacaacataatagaaaactgttccccattcacactagtaaaacatccctatgaaatacctcgaatttaatccaaagaggaatattttagacctatagaagaaaatgatggaattctaaatggaactattgtactgtgtaactgcaaggcaagacaagatgaacaattatagtttcctcctacatatttaaaagctcaatgcaatcccaatcaaaattatagtagtttaaaaaatactggaaaagctttctaaaattaatcgagaacaagctagaaccaacgtttttagaaaataagatagtggcaccttccttaggagctgttagtttcctcctacatatttaaaagctcaatgcaatcccaatcaaaattatagcagtttaaaaaatactggaaaagctttctaaaattaattgagaacaagctagaaccaacgtttttagaaaataagatagtggcaccttctttatgagctgttaggatatattatgaagctgaataacatggataaaacagctggaatggatgcaaggatagatcaagagatgaatagaacaaaatacaaaatagggatttcagaagcaggctatacaaacatttctcagacaaaagagatgtttcaaatgggagatggagagaataaactaactttaaaaaaggacagttggctattggtggaagagaaagattaatacgtcatacctcacacaagtcatatcagcaaatggggcaaaaagttaaatctaagcaataacaatgaaaccaatatcagcaaaattaggcctgtttccaatctcggggagtgtgctgtatagaagcaatgatgggttggaaatatttggagggcatatgatggacagaggatccccagccctaaatccacaagaaaaacacacatagcctgataagaaatgggctaggaatgtgaacaggaaactttcagtgtggacggccatgcatttaggccatagtgggttcccagcagccgtcagtgcggagggcagggagctgagagcagatcaggctgagccggggtcacgcggggtcccccagccactgagggccctgggcagcaaccacgcagaccccgccccccaggctccacctcactttctgtggcatttctgtgcctgttctgaccacagccgtggcagcaccatgtccatcaggctgcggccggcctggctgtggggtgactgcagcatcccaggggcgggcattctcatcagcgttttggtctctgcagctggcctggaggagtttgtctcacagtctgaggactgactgctctgcacccacccagggtggcggagccccatgcgctgcctgatcttaccattgtccccgctgacggcctttcccacaggacatcacaggcagctcatgctccccgcgtggaccaagccttagagagatgagagtgtcgctgactgtgtgcccgcaccggcatcatctgtgggaacccaggctccttgtccctacacctgtgtggaaactgctgccccccccccccccaagaggagaacctgggcagcgccagggttttggggaatcctgtgcctccatccgcccaccccatgatgcttttgttcccatcgagtcccttgtctcctgcgcaggtgcagcagcccctccctctcccctcgcattgctgctaaaacgggcagaaccctcgggcgggcggcacacagggagggtgaccaggcctggaggctgcagtgcccggaccccagggcagcttcccggaaggtgaccctgcagtgtgggctctcccaggtgagagagtgggtgggacagtcctggggcctggagagccccacagcccagggcatgacagcgaatgaccaggctcaggaagacccgggcacaggggctgagctgggactgagccttcctgggagtgaccgtgagtcccacctggtgaccccctggaggagttaggccactgtcccctgtgacttctaggttaagtcactcattcctaaaaataatcatggctggaggagaccaatgtcagctcaaaaccatgtgtcccccaggaacacaacagaaaagagaatcaggtgaccaaggagagtttattggggagcaggaggaggtgctgagaggttcaagtcgaggccaagtgacccagagcagagaagctgggagggaggacaggggacctagcaggcaggtgggcacctgctggaaggcaagagctggggagctgcaaggatggaggctcctgggagcaaggagggggggtcacctcagcacaggggagacacggggacccgtcctaggtgggggaagccacctaacccaggtcaggaactgagcccagctggcccagggcgggtgcccatcagcagctggactcctggcctgagcagaggcctcagcaggccgggcgggagcacgcggggcggcagaggagggacacgcaggaggccgggcggcagcagctggcctggcaggaggaggcaggggcacagcaggaggagacaggcatacagcaggcgggccggcatacagggcggcagaggagggacacggaggaggagggtctgcagcaggaggtggtgcagcaagccggctggcagctagactgctggcagcatgaagtggaagccccagagcagacgggcacacagcagatgggcttgcagcagacaggcttgcaacggacgggcacgcagcaggcctgctggcagggggaggaggtgcagcaagctggatggcagctagactgctggcagcatgaagaggaatcctcagagcaggtgggcacatagcacacaggcttgcagcaaacaggcacacagcaggactgctggctggaggaagaggcacagcaagttggctggcagctagactgctggcagcatgaagaggaatccttagagcaggtgggcaggcagcacacaggcttgcagcagacgggcacgcagcaggcctgctggcagggggaggaggtgcagcaagccggctggcagctagactgctggcagcacgagggcgtgcaggagctggtgcagcctgattggcaggggctgggctcacaggctgcctggcagcaggggctggacacacggctcactggggtgcagaccagggtcaggcagggggccggggcgcagcagctgagggcgcagcagtggggctcacagcagctctctgggcaggcatccacctgccaggagtcggagcaagcgctggagcagacggacatggtggacgcggccatgctggggtggggaggaggtgagctgcgggaggtgtgagtgagtgagtgtgggagtcagtgtgtgtgtgagtgactgagtgtgtgagtgagtgtgtgagcttcgtggggctctgcttttataccccttctggccttgttgttccagggcccacagcgtccccttcctggttgctgagaggtggcgtgtgtcatgactagggatgtttgtttgcctgtgatgtggcccaggtcataaatctcctgtcctgtctgggctgtagcctgtcccatgtggatccctgggggcaagagtggaggtggacctggtcccagcacgccaccagtgcagtccgggttgtaagaagggggctgcggaggcaggggtggcccttcagccttatgcaaagtgtggcatgccagggtgagagctgtcccactcacgatcgtgggggcgtctcctccctaaagcgggtcctcactgaagaggcagaagcagctggtagaagcacaggatcactggagcagccggagagaaggtgcagcagtggccagcgaaccccacagtggtggccctgcacattccttcccccatccccatcactgaagaaattagagccccaaacagggagaaggggagcaaggaaggagaggccatgcccctccccacggccttccccgaggtccactcagacgttggtgtgggaacgctggggataggactgggtttcggacaggaaagaaaagttttgaactggcccatggatttggttctgctcttaaaggccatagctttatgatgtgcttcaaccatagataactcaagtcccgttatcaatattcttaaatttatttttttttttttttgtacagatggcgtctcaagtgatccctcctgccttggccaaagtactgggattgcaggcgtgagcccggtgcctggccatcatcagtatttctgcaccacgtgtcttccctgttcctgttcattgtccttgctgtcctcagcttcctttcttcaaacgtaagctgcatgtgagcagggagtgtgtttgtcttgttcaccactcagtcttcaaaggcctaaaatcatgcctggcccaaggaaaagcctttataaaaatgggctgaaataataaacttttttggagaaattattgaagagtaattttgagctctgaacgcgattccattgtgccacctttttcttatgctgtataaaatgctctgtcaagttctcctttcgtgtgtggggaactggcttacatcagactggccatctagctgagaaatattaggaaatctggtttacaaacaaaatctctgttcgaaggggccgggaggtatcaagacagctgagacttgagtgagtgaatccgcattagagagaaactgcacagaagtgagtccaatattccttgtggattttcttactgaggcatttaccaatttacagaccacagccaagaggccgagagcctgatcagctgagcagagcttttagtagtctcatggaattagaagaaaaaaaccacagagttcaggacctgacaaggtggagggattctagcaaaaacaccctaggctttcagttggaaatgctgaatgtaagtgaagggctactccctaggaggaaggaaaaaccagaaagaatgaaacctatctttaaataaactcgcactgaactcatatgatctgcctgtagcctaactgcctcccagaaacaaaagtgatctcttctggagacagcagcatcaacagaggctcaaatcatcttataaattttcataaagtccttcatgcagtcaaaaaattactagggatattagaagacaagaccaactgaccaaaagaccaagaggaaaaaaacaaacaagagaaacagacgtgcaggagatctagatattagaattgtgaaactggaatttaatgctgattaacttgctcaagaaaatagagaacaaatggagaatttcagtgtcaaactggatttattaaatggaatcaaacaaaaattctggaaacgaagaacacaatagctgaaattaagaactaggtagcttagctttacaacatatagacaaaaccaaagagaagattagtaaaggaagggagatgaggaaatttcaagcctgaatacagagatgggaaagaaaagagggaaataaagaaagtggagcaataaacatgcctatattttgtgaaaatttatgggaaaaatgattgaaatcctacaaggagaggagtgaaataggggtagtaaaatatttgaagatgtaatggacaagaactttaacctgatgaaatgcatagatgcaaagagcatttaagaatctttaggccaggcatgatggctcacacctgtaataccagcactctgggaggccaaggtggtcaaactgcttgagcttaggagttgaagaccagccaggacaatatagcaaaacccaatctctacaaaaaatatgaaaagttggcccactttggtggtacatttgtagtcccagctactcaagaggctaaggaggagaatcacttgagcctgggaggtagaggctgcagtgagccaagattgcaccactgcactctaacctgggcaacagaaagagacctgttaaaaaaaaaaaaaaaagaaaaagaaaagaaaaaagaaaaagaaaaaaaggaaccctccaaaccaagaatctttagcaagtgaacacaaagaaaactacacctgggcacattggggttgaaatccaaagacagaaaaatttaaaaacagccagaggaaaacaagacatattaccttcaaagaagcaacaataacacttacagatgacttctcagtagaaatgatgaaaggcagaggacaatggaatgatatatttactgtctgaaagaaaagaagcacaaagctagaattctatacctgggaagaagattcccccaaatgagaacagaataatgacatcctctggacaccgagaggatatgtcaccagcaggatctgcactacagaaaatactaaagggagcattaggtagaatgaaaacaagcacagatgaaagcaagaagttgataaggaaatgaagtgtaacaaaagaagaacacatggggaaaatctaaatgaatgttgactgtataaaatgtaagttgtaaaatatttatggaaataaaatacatggcaagaacacaaaattcaggaggggctacatagagttaaagtggcttaagcacactgcaccatctgaaaaataatataaggtctaatttacatgagactttaaaaagtcatggattcatgttataatctccactataataacaaaggaatatacgactcactaggaagtagatgctagtacttggccgaatcattcctccccaaaggttgtctccacccagaacctcccaatatgaccttatatggaaataaggtatttgcagatataattagttaagtcatacgggatcatagtgaaccttaaatccaatgtctagtgtctttaccagagaaaggagaaggaagttcagacatacacacaaagggaagaagatgatatgacaacagaggcaaagattggagtgaagatagaagccaagggaacccaaggtttgctgggtgccaccagaagctagaaggagcaagggcatattctcccttggagctcggagaaagcattgccctgtggaaaccttcatttcaggtgcctggccctaagaactatgacagaataattttccattgtttccagtcacacttttggtgtaattagctatggtagcactaggaaccaatacaatgaaggaataaaaaaacttaaaacagtcaatccaaaagcagtaaagcaaggagataaaagggagtagattccttgcataagcaaaaaccactgtgagatgggaggtttaaactcaaacgtatcagcaaagccccacattctttccagtcctgcccatcagatgtatcattactttagtcaacacagctgtatagggagagttcactggggtttaagtttgcgctgtcctggtgatccatgatgtgaaacatgtttccatgtgtttatttgccatccatatttgttctttagtgaagggtctatttaagtcatatattatatggcaaaatactaaacactgtgggattctgtagatgtgatattatggcaatagtaatcataataagacaaaaaaaaaatcagtgccttttaggggctagggtggggatgtggaatgactacaaaggggcatgagggaaatttgtgggatgatgagaggagtctatgtattgatggtgttggtggagacacaactatctatatttgtcaagacacagaatccaagaaaaggaaaagtcccaaatatatcatactgattaaatgaatctaggattaaaagccattctacaaagcaagctatggacccaaagactttcaccactgaatgctgtaaataattgggagagaaataatgctaggcttaaatttctcagcttgttttattaggccatcataattttccagaccttaggaagtgggacctgtctagtgagagcaactgaggaatgctatgtgctgcccggggggagccacatggatgttacctggggacatgatggcctggtgggggaggagccagccacagaccaggagaatggccaggaacggaggctaatgaggaagccactgtcatgcagaagctggagcagactgatcagcaggggctgggcccacaggacgttatgcactgatgaaagtgaatccatcaagaagatataccaattgtaaatatatacatatctaatatcagatcaccaaagtatgtgaaacaaaaatggacagacatgaagaaagaaatagacagttctggttctacaataagagagacatcaatgagccattctctgtaattaaaaaaaaaaaaagaggccaggcgcggtggctcacgcctgtaatcccagcattttgggaggctgaggtgggaggatcacaaggtcaggagatcgagaccatcctggctaacatggtgaaaccccgtctctactaaaaatacaaaaattagccgggcatggtggcagccgcctgtagtcccagctacttgggaggctgaggcaggagaatggcgtgaacccaggaggtggagcttgcagtgagccgatatcgtgccactgcactccagcctgggtgacagagcaagactctgtctcaaaaaaaaaattgattaattaattaattaaaaaaaaaagaattaaattgacattcagtaaagaaatagaggacttgaagaaccccctaaacaggtctaacgtagatgcagaaacatccaacccaacaagagtagacaacaacacactcttctcaagttcacatggaacagttgccatattagactataccttaggccacaaaactagtcttaataatttaaaatgatcaaactcatagaaactatcttctctgattataatggaaagaaactagaaaataacagaagaaaaactggaattcacaaatatgtgtatattaaattacacactctcaaacaaccaaggagtcaaaggagaaactcaaagagaagacagaaaatactttgagatgaataaaaaagaaaacacagcaaaccaaaacttatgagatgcagtgaaagcagtatgtagagggaaattgataactgaatgcttacattttaaaaaaaaataaagatctcaaatcattaatctaactttatatcttaaggaactagaaaaagaggagcaaactgaatccaaatttagcagaaggtagaaaataaagactagagcacagaaaaatggaatagaaagtagaaaaccagtagaatcaatgaaccccaaagttggttctttaagaagagcaacagatttgacaaatctttatctgtctagatctttatctagacaaatatttatctagattaaaagatgacagattcaaataattaaaatcgtaaatgaaaatgggaatatcactactgaccttacattaataaaaaggattataaggaatactatgaaaatttgtacaccaacaaattagataactaatatgtaatggaagaattcttataaacacacaaactaccgacatggctacctttccttcatatggctccaggttactgtctagtgcccttttatttcagcctgaattagcatttcttgtaaggcaagtctattggcaatgagctttttcaggttttatttaccttgaaatgaatcactttctcttcagagtctcgctctgttgcccaggctggagtgcagtggtgcgatctctgctcactgcaagctccgcctcccaggttcccaccattctcctgcctcagcctcctgagtagctgggactacaggctcccgccaccaggcccggctaattttttgtattttgattggagtttcaccatgttagccaggatggtctcaatctcctgacctcgtgatccacctgccttggcctcccaaagtgctgggattacaggcatgagccactgcgcccggcccctctttcatttttgaaggataattttgtcagatgctgatgcctttttggttgttggtttcccctgccgctgtaccccaagccagcatgtgaaatatgtcatcccaatgcctctggcctccatggtttctgatgagaaattcgctgttagtcttctgtccagcagctttctagattctgttttgacttttgagaatttgattacactgtgtttttgtgtgattctctttgagtttattctacttggggttcactgagtggcttgaatgtgtagattggtatgtcttctcaatttgggaagttttggccattatttcttcaattattttttctgctccccctgtctcccctccatctggaaatccagttaagtgtgttggtatgcttgatggtgtcccacaggtcttctaagatttgtgcatttttctccattctcacatctactcccctttgtctcagctactcctcagactagagtatattaattcgtctgtctttatgttcactaattcttccacctgataaaatctgctgttgaaaccctatcatgaattatttatttcagttgttgtaattttcaattccagattttctgtttggtttctttttaaagttcctatctctttattgatattctctatttggtgaggcatcattctcctggtttatcttaattctttgtctgtgattttatttagttttttgaacatgtttaagagagctgatcgaaaggctttatctagtaagtccaattctgggcttcctcaggaagattttccattaattgctttccccccatgagtagctcatatttcttcccactttgtctggtgaaaaccagacagtgactattacaatgggatatttctgggtatcaggttctcctccctctgtgcagtttgctgttgctgattgttgtggattgtggttgtttttgcttgtttatgtcaagttaaaaaatagtttcttcatcatgtgtgctcactttctattagcttggtgctaagacagtaatttgacagagagttccttaaacgcctggaatcaaaaaattgtttttcttcagggtttgtagctgggctctgtgtattggtccacaccccccagcactcggctggggagtttgcgactctgccttccccttcacttcctgcttgcatcttcacttcctgcttgcacctttacttcctgcttgcaccttcccttcctgcttgctcagagcctgaagttcagccagaggtgagcactgagagcttctcaggtcttttctgagctggtgccccatcatgggcatgcgtgggggccttctggactcccaagagtaagtgggatctcccacctcccttattcctcaaagcatgtcatcttccagcttttcctcccaggctttttgggcatgcccaatgttttctggctgatacctttggccccaggtggcattgactgtttaatgttctgacaaagcctcagtgtagctgctctctgccttgagtctgatttggtgaaataaggcaagccctgtgtgttagtccttcagggagccaccagatgggtagaaacagacaactgcactgccttgcaaacaaggtcccctctgcttccctggcaacagcatcccacatcagaaactcgggctgctgccttcctgactgtcacccagctggggagtgggggatggggcaagggggagttaaaatccacaaggttgtcctattgggttgtgctgctttttcttgattatgtgttcccttgactgctgcaaaccttcaagtattttccagagttcagataaaattgaactccaccccctttgttggggtgggtgggtggacggcaggtggggatgggaaggtcttggggaagtgatggcggaggaagcccaggacagtgtgggaccacgtccaaaccagagggtgggagaacacgtgaacacgtgaacatgagtgcagatggagccagtttcaaacaggattgaacaaatccgagagtagactcctagaaatacaactgcagagccaggggacgctggccggggacggtgggtttgtttatttgggttttgccagtttctgatgttccgtggagggacaggccctcacagttccccgctgcaccatttcctctgacgtcggtattcacaggcacaattagggaccatctttggagggcatttctcagtatctctaagaattttaaatccatgaacactctgcaccagcaatgccacttttaggaatttaggcaaaaatgtacctgagtgtggaaaggtatatggtagaaacacccacagaggtgttagagatagaactcagagtcgtaaggaaaacgagcgcttagacaaaggactttttagcaaagcaaatttatctttgcgcagagaagtgcctctcacgtggccggttgccacgagagcacacagaacaaaggagagtgaaagtttttatttttgacgcaaatcctgcccctgtgcccttttttaactggctggggtcggaccacacaatctaagctagacccgattggctaaacatttaggggaaggggtcgtctgcggcgagctagagagtcagtcttttctcaaataaggaaaggaatgtgagctggtgctgtggcatgcctgggcgtgtaggaaaagcagaaggaaagaagaagaaagacatggggaggggtactgggaatgaaacactaaaggactgatcaggctgtttgaagagaaaccttgccatatctcacaagaggtatcgtttgtaataatgaacaactggagagacagtcagggccatccacctggcgttgcagacaccaagtgcggcgtgtccacactttggaacgctgtacaccttgctgaagaaaaccatgagaaaatagtttttaaaatcaacccggacaaaaaaaagaataatgtgtgccccccgcattgtgattgtatagctgtggagaagtaaagactcagggcctcttgcgggcaacgtggtgacggtcatacctcgccagcatcccttgcctgcatttgcatttctaggagtctattctcagatttgctcaatcctgtttgaaaccacatctggctacatctggacctgtgcgtccacgtgtttctctcgccctctggtctgcatgtgtccccatgctgtcctgcacttcctctgccattggggccttgctgttcccaccggccctccgcccacccagcccagcacacggagctctggaggccgcgtctctgttctctgctctgcatcccagctgtaagcctggtgcaggaacagagggcgcccctgagcgtatgtgagtgtgcgcaggaggccaggatgcccaagctgtccctgagtggaactccctgagcgcagggacagctggagcccaagtctcccgccgtgtcccacctcccagcacagctggggcctgccaccccccgggacagccccaacccttgccatgggaaggagctgcttctacccacagtgcgtggggcgttggcctgagtcatgtggtgtctgtgggactcagccaatgaacaaggcttttgggccccacaggacctgggaggggagccggacagcagaacgtgccacgaggtggacaggagcttccaggtgtcacacaagagccccccggggcccccagctggggaagtaaagagatccacggggcccagccccccagagccaggccaggccccactctgccccctcccgccctgggtgcggagagtcagcacggagtcagctggggccgcagacgctttattggtgctcagaggcagagggtgacgctcctgggggtgagacccaggtcaggagggcccatccccaaccagcgaccagcgaccagcggagggttgtggtctgcagccaggaagcaccgtgaggagaagccagggctcgcccgcccggcgggaggtcagagaggagccagtgagcatctgagaccccggggctgggcggctgtggctggggctgctccttctgtgctgagctgtgctgaggctgggtgggctgggaggtccaaggactggcagggaggtggggcctgagcccggctggccctgggggacatggccatcagcagctagacttttggcctgaggaaaagctgcaggaggctgggcgggagcacacggggcggcagaggagggacacagaggaggagggtctgcagcaggaggaggtgcagcaagctggctggcagctagactgctggcagcacggagaggaagccccagagcaaacaggtacacagcagatggacttgcagcagacaggcttgcagcagacggacacacagcaggactgctgacacggggaggaggtgcagcaagccggctggcagctagactgctggcagcatgaagaggatgactcagagcaggtgggcacgcagcacacagctttgcagcagacaggcacacggcaggactgctggcaggaggaagaggcacagcaagctggctggcagctagactgctggcagcatgaagaagccccacagcagacgggcacacagcacacaggcttgcagcagacgggcacgcagcaggcctgctggcagggggaggaggtgcagcaagccggctggcagctagactgctggcagcacgagggcgtgcaggagctggtgcagcctgattggcaggcgctgggctcacaggccgcctggcagcaggggctggacacacagctcactggggtgcagaccagggtcaggcagggggctggggcacagcagctgggggtgccgcaggggagctcacagcagctctctgggcagtcgtccacctgccaggagttggtgcaggcgctggagcagatggacatggtggaggcggccatgctggagtggggaggaggtgagctgggggaggtgtgtgagtgagtgagtgtgtgtgtgagtgtgtgagtgagtgtgtgtgtgagcctgttggctgctggggcttttatatgcccagggcctgtgttttcccagcaggagactcagcaacgccctccacttccgtgttggtgtttggagccgggaggaccctcattatttctgcttcctttgccatgacttgtcctcactctgctcctaacactcggctggtcctgggcaggaccggcgcccctggctgagcctgtcccccgggaacaccaggagggaaggtgtggcctctctggggctgacctggtgacttccacctggcaggtcccgtgactgtgcccagcgtgagctctgggcccgggggaggcccagcctctgtctgcagggacctcacagggtgggctggcgtggctgtgattgggagagccaggatggaggtgcctgtgttgggaaaagacgcttgaggacagcgcttcctggcgggctctgggatcttctgagatcctgatgtctgccaagagcaggaggacagggaggacctcccctcctctgagaaggagatggaatgttctggcaaggcctctggacagtcagctcattaggaggacaaggtttggggactggcctttgggtctggactgttgtcccctggagccctggtcaggtgtcctgagagtggtgggtgcagatccaggcctgggggtggggaggggcctctgccttgaggaggtggatgtggaatgagggtcactggagagtgaaggacacttggggtgggcaaagccagcctgtgcttgggaggtcatcaggcaggacaggccctgaccccggggcagggaccgtcacaggtgagctcctctgtcttggggcctgagcccagcatggcctgaagctggttctcaccaggaaccagcaacatctcccagtgtccttccagcctctttcagctggggatgaggctacggcagcctgggacgggctttcatggtggcccagaaagcctatagcgctagggaggctcactggaagctctcctgtcatagcgtagcaggaggtgagcaggcccctggtcaccagaacctttctctgttgtcctacagggccagtcaaagcagcaagccgagaaatagaaatgagacgtgaacctctgttattcgcaggtgacacaattgtccacctaaagatctgagtcactgccattgtgactgtcactggccatgtgcaccggctggacgtgggataaactcacagcccccaacagcccctccctgcacacctgcctcgccattgtgatggaaattccatctgaacctggggcctccagcacgtgccagtcactccgccctccatggctgttgtcaaacaagcccctccgacctctcaggggtgatgtctgtgaagactcagctcccgacaagagcctctcatctgaagacgcagggcagtcagcactgggagccagggtgagagccgaagggaagccgaggcagcggcgttccctaatggagtatgagggggagggtcccacagacctggagctgcaaattatagcatgtgactgtagtgacagcttcggtgatcttagaaaatgaccccctagtagcactgatgatgaagctggtgaggtcggagcatgtggctgcgccagggagcattccaagcacttggcatctattaattcactgaatttcggcattaacttcttgtcgaagttactatggacagacgcggaagcttcagcagagaggttgagcaatctgctcaaagccacacagaaaacagtgacagaaccaggactagaagccagccggtctgtacataggatctacattctcaaccagtgagtctccgattctaaaaataaaaaatgttgaagatgaaagacagcaagtcttcaataccaaatttaataccaaacagctggattaaaaattcacatcagaagcagaagagcaaaactaataccacagagaatcaattcaattttaagtccaaacatgagttcttccaaacgccgaggtaaaggataaaattcacaaatataatgagagaaaagataacaaacagagtgtatatttagctgagacaaaacctgaaaattcaattgctagggagaaaaaaaaataagatcaaagtaataaagaaataattgaggatcaggtattctgggctgaatggacagaggtgtgtgtatttggagtagaagaacttaatgaatttcaagaaaatcaggccacctagacatgcattgacgagtttttcaatgtagaagacctaagaacaggcctctcacaggcaagacgaataatacacgatctggaaatgaactgcctcaggctgacctcagacccctgtcccactaaccagggtatggcaatatcctcagggcttccagggcaatctttggtggactaaggctctaattttccttttttcaaattattacatctttctcaaataaagataacagcgatgtattttcacaaaagcaagagcttagaaagtactccacccaggtatccctcttggaaaaaatgcttaaggaaatatgacaaatggcaaagtgattgttatggatggaatgtttgtatcctcccaaaattcacatgttgagaccctaattccaatatgatggtattaagaggtggggcctttgggaggtaattaggtcaggagggtggagccctcaaaaatgggatttgtgccctttaaagaagaaaccgtggagagattatctgggccacgtgaggacagcaagaaggtggctgtctgtagaccaggaagagagccctctccagagcaccaccatgtggcaccctgactgatcctggacttccagcttccagaactgggagaaagaaatgcctgctgctcaagaccctccagtccacggcaatttgttatagcagccccaactgactgtgacagagaagaagcaaagacaagagttccagaacgtagaagctggggtatcaaagggctggcccagatacaaagacaggaagacactgacctaggtccagataaccaatgtgctcagttataactgcaaatgcaaatttcacatattttataacagatgcatacaacagatgcatattctacatcctaattgaatggcagtgataatattctaatactttactgcatgctagtgtgagaggccgctaaccacacgtggctcttgagtgcttgaaatgtggctcatgccagttgtggaaatggtaacattctggatgtaccgggttaaataagatctattgttaaattaattgcacctgttccttctgccatctttaaatgtggctgttataatatttaggattgtatgtgcggttctgtttctactggaatatgctgtatgttgttttcaatcaaacaagaaagactgagaagcgggtgggggtggaaccgtgggctgatgttgaggagagcaagattaattctgttttaaatagaaattctcgaattgcggttccattcctcactttaatagttaaaaaataagcataaaggtaaacttaaaagctatttattggtacaattaaaaacagaatgtatatttttcaaaacagcaaataaaagtagaagagaaaaaacaaaccgtggtggatatcctaaagacggaaaagcaaccgaaacaggcggaaacctcaaaagcagagaagaccatgaaaacgtgaggaggagcaaaacagccagttggaaaggaaaggaaattgctcctgatgtttcctattagatgagaacatttctcaaaacggtttataaaataaaaaccgaaataaggtaactaatgtcaccattaaacagtaacgggagggaaaagagacgtctcccaggtccgacggctgccggggcccacacagagcctcctctcccatcctccccaaggggtgacggcacacagcctagaaatggggactcccgcactagcagggcccccacatcccacaggatgagccaaagggagggcagcctggctcaggactccctgaagatgcagaagccgtgttcccttacagagtcccacccagtggggagacgtgggcacttggctaggccagctggccaagggctgtgggagatgggcggtgaagggcaccaggatctgggagccctagtgtgagaagtcccctcccagtccttatgtggtgagtcccccaccccggccacacacacatcccaccccccttcacaagcagggtagaggctgcacacacacagtcatggggctcagggcaaggcagccttgctctgggctactgatcagacccaggacagagaggtctggggacagcccttcctgccatgcctgctccccttgtcctggtggctgggctgggagcttgcaaaggaaaatgacagtgacaaggggcctgtgtccttctgtcctggaagcctgtgacactcggacagggacttccaactgtgtattgcatttgcacagacatgccatcgaaactgcaaaggagtaaatgactgctgggacaagttaatagatacagcggttcaaaggaaaagacctactcaagaattaaggaatccttgtgaacaacaggggaaggttacagaaaatttccagttattcttaagaattaagaagtcgtgccgggcacggtggctcacgcttgtaatcccagcgctttgggaggccaaggcaggcagatcgcgatgtcaggagttcaagaccagcctggccaatgtggtgaaacccagtctctactaaaaatacaaaaattagccaggtgtggtggtgcacacctgtagtcctagctattcaggaggctgagggagaagaatagcttgaacccgggaggcagaagttgtactgagcggagattgctccactgcactctagcctggcaacagagtgatacccgctctcaaaaaaaaataacaacaacaaaaaaaaaaaccaaaagaccgggtgcagtggctcatgcctgtaatcccagcactttgggaggccgaggcgggtggatcataaggtcagaagttcaagaccagcctggccaagatggtgaaaccccgtctttactaaaaatacaaaaaaattagctgggcatggtggcctgcgcctgtaatcccagctactcaggaggagaggcaggagaatcccttgaatctgggaggtggaggttgcagtgagccgagatcgcaccactgcactccagtctgggcaacagagccagactccgcctaaaaaataatagaagttgctccagggattccagttctggaaacctgttgatgagattgtttgacccatcatcctgctgaaaacaattgaaaacactaggaagaatcttcctagttgcaacaggaaactggaaaaggaataaagaattacaggattacaggcccaaatcaaagacaggggtctttgccctttttgcacaagggaacttcccggccacctcgtgaaagctttggaggttttcagataagtaaaaggaaaccaacttcatgaaaacactgctgttacactatgaaaaagtgaactggtgagatagcatgtacttccctagggagcatgtgcctggtgggacccagcaggtgcatctcgcgctaccataattatgaaacagcagtggccagaatgaggttttgagcatttgcggccggcataatgtgacgccacgcatctcattcctgttggtgacaaagctgcaggtgctgccataggttttgtcggctacatgagagggttcctcacataaggcaaaagaaaacacacctgtcttagaggcctcaaaaatgcccacaaatactttccaaggacaaaggtggttactcagctgcaaacagtgaagcacacaaggaaacgacaccatgagcgagaactggtggaaatgacagaaagctgaaatggacccacagagacttcaggcattgggatgaccgtgcacagatatttgaaataagagatcagctctaaaatgtcttccaggaatgagaaatatttattttatttaataagagagggctggtgagaagatgatgagtgggggtcagacaggcagaggaaggagagagggggaggagctgagcccagggagaggccgggccgggtgggtgtgggggattcacagagaagcacccccggggcctggagacgctgaggctggcaggagaaccccacaacagcagaccccgcacagcgggaagtcaggactgcctccgcccctggtgctgtcagcctggatgcagctcaaggccagagtcccgaagctcccaccccacgcggcacgttgaagttcttcccacagggtttgccagatatgcaaaaaagacctctgagagggcacattggtgactttatttgttgacagactgatcactcacatggggcaggacacagtgaccaccggctggccagcatggagatgagggtgtgggagagatgcatgcctggagggaatcggcatgaaagctcagcattgctggctggaggtgcagtggctatgggcagaggagactcagacagggctcagggctgcaaggattttcggaagtcagagatggccctggaacaactctggagaaacgggacctgcccgtcagcagctggacttctggcctgaggagaggccgcagcacgcggaagagaggcgggagcacgtggggcggcagaggagggacacgcaggaggccgggcggcagcagctgggctggcaggtggaggcaggggcacagcaggaggggatgggcacacagcaggtggacctgcacacggggcggcagaggagggacacggaggaggagggtctgcagcaggaggtggtgcagcaagccggctggcggctagactgctggcagcatgaagaggaagccccagagcagacgggcacacagcagatgggcttgcagcagacaggcttgcagcagacgggcacacagcagactggcttgcagcagacaggcacgcagcaggcctgctggcagggggaggatgtgcagcaagctggctggcagctagactgctggcagcacgagggcgtgcaggagctggtgcagcctgactggcaggggctgggctcacaggccgcctggcagcaggggctggacacacagctcactggggtgcagaccagggtcaggcagggggccggggcgcagcagctggtggcgcagcaggggggctcacagcagctctctgggcaggcgtccacctgccaggagtcagagtaagcgctggagcagacggacatggtagacgtggccatgctggggtggggaggaggtgagctgggggagacgtgagtgagtgagtgtgggagtgagtgagggagtgagtgagtgatcgtgccaggcctctgagtggtcggaacctttatacccctctgtgttgattgtgctgcccctgcctggcttcgagaagccttcctcttccttgttgttgttgtaggcactgttgtgttagtagtgttggttcattgtttgtggatgttctggtttgtgaggctcctgactggagttagggcttccctaatgtgggcttgtccacagagataaactagtagaaatatattgattgcatcaaagcacactgcagaagcagggacagtggcagttaggagatattctggaattgacagccctctgctccatcccaggaggagtttgcacttaaaaaaagacttctacacctaaggagggatgaggttaggagaacctcagtttctgggccttgaggaaagggagagatgtgttctgctgtggacaagtttgaagatgctcagttggcctggccacacggcgagatccaccctgtgggttgacactgctggttgtcagtgggaaccatggggcatatttctgctgggggtgagccctggggcaggtgtgagggaatagtgtcttcctgggcagagattggctcgcagaggggagcagggaggcagctgcaggcccagcacagtagggatggagatgaggggcaagcacctttgtttcatttcacgttgaactgttatggggccttcccccggtggtgtgcacaatagtgttcacaccttctcctctcacatctcgggcaacatcacctgcaatggtgtccttgggagctccaaggtctcttcccttatgggccagaaagtcatcagaatgtattagttctactgttggctcctggacattgtcatagtaaatgtacaaataaaagggtctgattgcagagccttgtctcacaaatacctatacacctgtgtgtatcagcccatgcctgtgcccgggaccatacctgtgcgctagtaagcccccaaagttctgatcatggatccctcatctcctcactctatgatcgctattttctactaaatctttgaaatggcaaaggcagaggctctgatgatgctctaggctgcagggctttccaaaattaggccaggggtccactgagtgcttggtgggggcccataggctgcagggtttgaagcctctgacctttgatgagtatggctaagggctctgttggaggactacctggcaaagtcagactacagtggaaaaatattatttcatagaaataatagctggacacagactggcaaattggatgaagagtcatgacccgtcagtgtgctgtattcaggagacccatctcacttgcaaagacacacataggctcaaaataaaggaatggaggaaaatgtaccaagcaaatggaaagcaacgtaagcaggggttgcaatcctagtctctgataaaacagactttaagccaacaaagatcaaaaaagacaaagaagggcattacataatgataaagggatcaattcaatgagaagagctaattatcctaaatatatatgcaccaaatataaaagcacccagtttcataaaacaagctcttagagacctacaaagagacttagactcccacacaataatagtgggaaactttaacaccctgctgtcaatattagacagatcaatgtgacagaaaattaacaaggatattcagaacttgaactcagctctggatcaaatggacctaatagacatctgcagaactctccaccccaaatcaacagaagatacattcttctcagtgtcacatggcacttattctaaaattgactttataattgaaagtaaaacactcctcagcaaatgcaaaagaactgaaatcataacaaagtctaccggaccacagtgcaatcaaattagatctcaagattaagaaactcactcaaaaccacacaactacatggaaattgaacaacctgctcctgaatgactcctgggtaagtaacgaaattaaggcaaaaatcaagaagttatttgaaaccaatgagaacaaagagacaatgtcccagaatctctggaacacagctaaagcagtgttaacagggaaatttatagcactaaatgtccacatcagaaagctggaaagatctcagatctacaccctaacatcacaattaaaagaactagagaagcaagagcaaacaaatccaaaggctagcagaagacaaaaaataactaagatcagagcggaactgaaggagatagagacatgaaaaacccttcaaaaaaatcaatgaatccaggagctggttttttgaaaaaattaacaaaatagatagatcactagctagactaataaagaagaaaagagggaagaatcaaatagatgcaataaaaaatgataaaggggatatcaccactgatcccacaaaaatacaaacggccatcagagaatactataaacacctctacaaaataaactagaaaatctagaagaaatgggtaaattcctggacacatacaccctcccaagactaaaccaggaagaagttgaatccctgaatagattatagcaagttctgaaattgaggcagtaattaatagtctaccaaccaaaaaaagcccgggaccagatggattcacagccaaattctaccagaggtacaaagaggaggtggtaccattccttctgaaactattccaaacaactgaaaaggagggactcctccctaactgattttatgaggccaccatcatcctgataccaaaacctggcagacacaacaaaaaaagaaaacttcaggccaatatccctgatgaacactgatgtaaaaatcctcaataaaatactggcaaactgaatccagcagcatatcgaaaagcttatacaccacaatcaagtcagcttcatccctaggatgcaaagctggctcaacataggcaaatcgataaatgtaatccatcacataaagagaaccaatgacgaaaaccacatgattatctcaatagatgcagaaaaggccttcaagaaaattcaacatcccttcatgttaaaaactctgaataaactagatgttaatagaacatatctcaaaataataagaggtatttatgataaacccatagtcaatatcatactgaatgagcaaaagctgaaagcattccctttgaaaaccagcacaagacaaggataccctctctcatcactcctattcaacatagtattagaaattctgaacagggcaatcaggcaatagaaagaaataaagagtattcgaatagaaaaagaggaagccaaattatctctgtttgcaggtgacatgattctatatttagaaaaccccatcatctcagctcaaaaattccttaagctgataagcaacttcagcaaagtctcagcatgcaaaatcaatgtgcaaaaatcacaagccttcctacacaccaacaacagacaagcagatagccaaatcatgagtgaactcccattcacaattgctacaaagggaatgaaatacctaggaacacagctaataagggatgtgaaggagctcttcaaggagaactacaaatcactgctcaaggaaataagagaggacacaaacaaatggaaaaacattccatcctcatggataggaagaatcgatatcatgaaaatggccatactgccccaagtaatttatagattcaatgctattcccatcaaactaccactgacattcttcacagaattagtaactttccaaaattattgaaaaacattaatctacatatccaggacctcagaaaactctaaggtggagacacacaaaagatacgcaaacagacatatcatagtaaaaatactgaaagtcaaaaacaaggagaaaatcttgaaagcagcaagagaaaaacaagttatttataagagaaccataagaagagcaacagttcacttcttatcagaaacaatgggcaccagaaggtagtatgatggtacattcaaagtgctcaaagaaaaaaaagtcagccaagaattctatatccaacaaagttgtctttcagaaatgaaggcaaaataaaggcattcccagataaatcaaaactgagggaatctattacctgcagatgcatcttacgagtcatactagcgttccgcagaccaaaagcaagtaactccagacagaaattcaaatccacacagaaaaacaaaacagcagtaaaactaattatgtaattataaaaagtagtacaaatgcatattttctcctttattctcttaactgatttttaaaaagcaatataaaaaggtatatttggtgttgttgggcctataacatatagaaatctaatatatttggcaataataatacaaaggaggtacatggaaacaaagctatatcgtgcaaaggaagttactgaagatagtaatgtgaatccacaggaaaaaatgaagagaatcagaaatgataaaaaggctaatataacaaatgatataaatatatacttgttctttcttctctgagcatctttaaaagccataaaattataggaagtaataagtataacaatatattgttgggttttaacatctgtagatgtaatatatataacaacaagactacaaaaaggacaaaaaggaaaagagttgtataggagcaatctttttgtatctcactggtattaagttggcacaaatctgaagttgatcttgataagtcaaaataagtatatggtaaaccccagagcaaacactaaggaaaaactaaaacagtgtcatgggaaaacataaagaaatcaaaatgctacattaggaaatatgcacttaatataagagaaagtagtgaagaaagaatataaggacagtggtgacaaaaaaaacccataaacccacagaaccatataaaacatatgggaaataaaaagtaaactagtagacataaattcaagtacagttgattttcattgttagtagtaattacataaagtcattgcaaatactgaattaggaaataatataccattgttcctaggggaaatacagagtttggttcttgtaatcctctggtcgcagtttcaactatcaacatatagtcgagtgttatatatgtttaataattattgtttattcattaacattgaactcagccaacagtactacaacttatgccttaacaaagcttctctaacatacatattttctctgtaaggcacatcacagcctttttgcacttaggaacactgaacagccccttcaccaccatgcctgagggccattttaaacagtaaagtcacccaaaaaatcacaaaaatgtgaaaatgtggcattaagtagattacaaaaaaaaatgcttatttacaatatgagagctgaagcaagaatgcagagtgtgccttgttcaaccttatctgggaacatgcattttgggagactcaaatttctcactaatctgtgcatgccaatgaatgaccacaaaagtgccaccagtatttgagattacaaattaattttagagagtagctgaatttgcaaatacaaaattcataaaaaatgaggtcaactgtatatcaataacaacattaaatgtaaatagattaaataacccagtcaaaaggcagaggctgtcagactggattaaataaaaaacaagatgtaatagatactctgtaaagtaggcattctttatattgcaatatacaactagattgaaagtaaacagaaagagataaactatacaaacaacaaccatgagaaaattggagtagcccaactgctgtccgataaaataaattttaaaacaaaaattgttactagagattaagaggaacactttataatgataaaaggtcaacctatcatgaaggtataataaatataaacatgtatggaaataataaaagagcaccaaaatacatgaagcaaaagctgacagaaatgaagggagaaatagacaagtcaacaatattaattgaatagttcaacaccgtaatttcaacaaacggatagaataactaggtagaagatcaacaagaaaaaggaaaacttgaatacaataaaccaataaagtctagcagacacctttagactgttcccacctgatgacagcagaatatacatttttttgaaatgcatatgcagtatcgtctagcataggacatatgttaggccataaaataaacctccagtaaatttaaaaagacagaaataatgcaaagtatgtattctggccacaataaaataaaattagaaatcaataatagaaaaaaaactggggaaacacacaaatatgtgaaaattaaacagcacactcttatataaccaacaaacaagtcaaaaaagaaaccaaaaggaaaatcataaaatcatcaagatgaataaaaatgaaacccaaaataccagaacttatgagatgcagcaaaagtattgcttagagagaagtttatagttgtaaatacctgtattaagaaagatctcaaatcaataacctaacctactttaagatgctggagaaagaagagccaactcaaagcaagcacaatgaaggaaataatgaagattaaagtggaaataaataaagaattaaaaccaattcttcacaaaccctttcaaaaactaagaggaagtattacttcctaactcattctatgaggctagtattagtctcataccataatcacacaaagacatcataagaaaagaaaactacagaccaataccactatctctcatgatatgaatgcaaaatactcaacaagatactagcaatctgaatccagcaacataaaagaagagttatacaccatggctaaatgggatttatccctgggatacaagattggtttaatatctaaaaatcaattaatgtaacacaacacatcaacagaataaaaaacaaaaatagcatgattataacaatagatgcagaaaaagcagttgataaaatccaccatcctttcatattaaaaacactcaataagatagagcaggaaacttgctcaatttgttaagggcatctatgaagaatccacagttaatattatacttagtgggaaaaaataaaaagcattcatattggaaaagaagaaacaaatcatctctattcacagatgatataatcttatatatagaaaatcctaagaaattcactaaaaagctgccagctcagcaaggttgcaggatacaacgtcaacacacagaaatcaatggtatttcaggccaggtgtggtagctcatgtctgtgatctcagcactttgggaggcccagaccagcctggccaacatggcgaaaccctgtctctactaaaaatacaaaaattagctgggcatggtagtgtacacctgtaattccagctactctggaggctgaggcgggagaatcgcttgaacccaggaaatagaggttgcattgagccgagattgcaccactgcattccagcctgggtgacagagtgagactctgtctcaaaattaaataaataaataacggtatttctatatatttgcaattaacaagccaaacatgaaattatttataatagcatcaaaaaggaaaaaatactaggactagatttaacaaaataattataaaacttatactctgaaaactataaaacattatttttgttttgttaaggaagatgtaaacaatggaaaagcatcatacgttcattaatctgaagtccatgatccactcatgttaatattgttaacatgacaatactccccaaattaattacagatttgtccaatctcaagctaacttctctgtagacattcacaagttgattataaaatcaatatgtaattacaagcgatccagaatagccaaaccaaaatttaaaaagaggaacaaagttggatgactcatagttcccaatttaaagatttactacaataaatcttggttactacagtaaccaagactgtgtggtacaaatatataaatagacaaatgaatgaataaagtaaaattgagagtccagaaataaacccacctatctatagtcaatttatttctcacaaggttgtcaagaccattcaatgaggaaaaaataatctccttagcaaatggtgtgggggcaactgaatatctatatacaaaagaacaaaattgaccccctacctcacaccacatacaaaaattaaatggattgaagactcacatgtaagtaccaaaagtataaaactcttagaagaaaacataagggtaaatcttcatgaccttggatttggcattggattcttggatatgatatcaaaagtacaagcaacaaaataaaaaaaatagataaattgaacatcatcatggtttaaacattttgtgctccaaagggctctaccaagaaagtaaaaggaaaacccacagaatgggagcaaatatttgcaaatcatatatctgataaggggctcatcaaatacataaagaattctttataactgagcaataagtccattaatccacgaaaaactgggcaaaaaatttaaatgaacatttctccaaggaatatgcacaaatagccagtacacacatgagaagtgctcaacaccactgttggaaatgcaaattcatttttatttacttcagaaggacctgctgcacagatatgacgtgcactgtcccagaaaccgtgggggaaggggacagagacaaacattactgtcttcaccttccaaactagtaggcagaggatgggatggggcttgtctgttagatttgggattgatggcacttcaagtcttagataaatgggtctacaaagtgtccctttttagatgtgattttattgttagcgcttcctgccaaaggatgtcaacataaaaactctgagcactagtccctcgattgcaggaattggctgtgcaaaccactagcaaatggtcacacagactctcacatactgccagtgacagggacctcactacctagcaaggccagccactcttgatcccagagaaacccagagagtccttgacaaatgccgcccctcaacctgtgcacgcgttggtactgggaacctcacaagggaaaattacgctattataacacgaagtgcagaaagtgccactgaccttgggtggaagattgggaactctcaaagttacgacgatggaaaattcttcagggaagaggtcacactgggagaaaatcctggatgctgggaagctcatggtgcggggggcggctactgagagctggagtccccgtgcaccgtgaacctgaactatcctgatcccgcttgtggcgccatcagaagggaccacttccgccaggatgtccagggggcgcaggtctgtggcaaagaaatcacaggtgggttaggccaggacacccccaaaagtggatacccataacagccaacatgtatggggcatcagcgtggcaggcactttacatagcactatagcccctatgagctgtgaaccaaggttatctctgtttcagtggtaaggaaacagaggcaccatgaggtgtgcccgtgtggcctccccccacccctcctcctgctcctgggggatcttgcacggctgcctctgagctgcaggtaacattccacccatggctgctgttttcaagtcggcagccaggcactgtgcagggtgagctgtgcgggacgaaggaaggaacgcatggccccaccgcagccacgggaaccccaaaggaaacgcaggaagcggctgggaatgagaccaggcaggcccaggctcctgtctgctggcctcccttgggtccctgtgctgccctcgggtgctgtgggaggctggagctgccatggagctgcagtgcctgcccctcgtccccctctgggcgtgccaggggagtggataagctcctggggaacctgggattcaaagttggtgggaacataattgatgggctggcctggcctcctccgaggccaggtgacagggaggaaaatgggaagcatggagggcattcggggctagcagagggctgcagaccagatccctggcccaggctgagtggctgggagcagagcctgagactgatgcctggaccctcctcagctcggccactgcagctggccccagcctgggtaaatgccagggcgtggctgaatgaagcaggtgttcctggagctgtctccctccatctggcagtcttgctgaggggcctcctgcctcagcctggcatgagggtgttgggtcagtccactctggcaccctctagggttcatcttcccccacgtgcccatcctggccggcattgtgtagggaatgtcatggattctctgtgaaggccccggaagggctttggtcaaacatctcaagcagaggccttcctcccccgcctgcctgcacgtggcagggccccagtgagcagctggagagcaggactccactccaggccaggagaaggcacagcccttccttgcaccgccacgtgcatcgcagtgccacagctgcagtgagacttggatcctctgtgtcctccagagagtgtgagcacctgggatggagcagttctgcagaagagcctaccctggaaaagcatcccggtccgcacacgcgcacacagggtgtgaaacgcagggtgtgacgggcacttctttcttagaaaaaccggatgtgacgcagccgtgcacgtccgcacgtgtgcacacagggtgtaacgggcacttacaaaaaccggatgtgacgcagacgtgcagtgcaggaacagccggcaaagcagccgtgagcaccctggctgcaggacgctgcctgggcctggcccaggcacagagtgggaagatgtggcaggacacaccatgggccaaggatggaaaggatgcagagggtcctggctggggcaggggtgtgtgtgtgtgtgacccacagcaccagagagtttggggacatgcagatggagggagcacagtgaagaaagggtggcctgctttaggacaggagaatgtattattattgttactatttatgcaattaaacacaaaaggtagagtgtgaggaggctttgccgcttcttggaaagaccctgagttataaaacatgccacgacatagggacagcaacagtggacactgtgtgtagagaggtctgtgtacagggaccacccccgatggaggctgctgtgtgtgtttagggggtcccaggctgactctgggaggattctggcatcttggtgtggggggattctgtgcctcagggctctgatgttggcccaagcctcaggctggcggaggttggggatgagactccacatactgtggcgttgcgtcctgggtcccctggaaagaatgggtctctaagtaaaccccatgcaccctactgcccctccccccagtctcagagagacactgctgcacagcactgcctggtgctgggctcacccctgggggtttagcttgagcacgaccaggggccacctcctcaatgaggaaacgtgggggccaccatccagaaggtgccctgcccagcactcaggatgagcctctgccctgctgagccccgggatagacagtcagcccatcgctcgctgggctttggcaatcaggaaacagaatcctgaccatcccagcaagagcctctccctccactgtttaattaaaatagcctcttcctggctccggaccccacgcctgcagtgttgtgtgcctctcagcctcctgggagtggacacccaagggcagatgagtccctgacacagcctcggcagtgctgggtgggggcctctggatgttgacctgccctcacagccaccttgtggggcatcctccttgactctatcatcggtgagacatgggtccagaagccaggaattatggaattacagaaggggctgcagagataagctcgttcacagcctcaggcacaggccaggtatagccgctgaggatggagaaggagggaaccgggcgctgctttgaaaagaagaaaggtattgaatccaacataggagctttgccttgagaaactagagaaagatgaggaaatggaacccacagcaagcaaagggaaggatggggcaggagtccacgcaattgaaaacaaaaggaaaatagaggaaactgattaaacccaagctggttctttgagatccatcaaattgataaacaatatggagaacaaaaggggatattgctaaacaattgtcagaaattaaaaggctgataagggaactccataaacaacaccacgtgttgtttatcaaaacctcagataatgtggaccaattccttgataggcgcaaataccagaacttattaaagaagaaaagataattgggaggtccaatatctaataaaggacaccttccaacacagaaaaactacagtttcctggaaaatactaccaaccctttaaagaagaaaaaatgtcaattctacatcatctctttcagaagatagaataggagaaaacaccaactcttttcatgaaggcagtgttaccaaaccaggcaaaggcattgcaataagagaaaactacagaccaaccaaaatcctcaataaaatattagcaaatacaatccagcaacatgtaaaaaggacaatacgttgtagagatggggtctggctatgttgcccaggctgatctcaaactcctggccttaaataatcctcctgccttggcctcccaaagtgctggaattacaggcatgagccaccacatccagcctagaggggaacatttcagaccagataacactagtctggaaaaaccagcaccaacaggattcttagtggggaaacccctccctctaagatcaggtgggtgttaatgcacatgccagcctccttgctctgtctcctgggagggctgggaaagcaacactccagtagtgtgagcacaccttgctccagattttggtttctaaatgccttcgtccaccaagaggaagcagggcttcctagagaagcgtctgattccagggatgaaacagggcaaatctgagatgaacttggacccaaaagtaagaaaggtcagggagggacagcgtgttgaaagggcaccagggccaaaacgaaaggacttgagggccgaagttggaaccactgcaaccacaaaatacatagtgatcatattggattatagctcaagtaatagataaacattctttagtccacacatagataaataaataaggaagcaaatagacacacagaagagcgggacagctcctcctcccgggagaatttcaattagtaagtgtggaaggaacaaggcagggaggagaatcctcaacagagccccacagggaccgtgcgggcgaggcccccggaggggcaccagcactgccgggcaaacgcctgggcagacgcgggacagctgccaagtctcagacatgaccaattacagagggaaacggcggcaccgcgagggatgggccgcggccgtgtcacctccatgccccacgcacactgctcctgtgggattcctcccccaacacgatgcccactctgaccacgaggaaacctcaagcaagtccacgtggaggggcattctacaaaacacccaaccggtcaaggtcgctgaggccaaggagagattgggcaaccgtcacaaaccagagaagccgaggagagctttcagccaacgccatgtggggtcctgagcaggacccaccggaagttggtgcagctgcctaaagaccgtcctggctgagaagaaacagagcagcgctgctttctcagagctgggaaccgacctgcggtggtgtcgggaagctggcgaagggcgatgtgaactccgcttttcagccactattccctaaaaccattccacgaggtcaagccacacctcacaagcaaaggctgctgagtgcccagtgctgggcacctgctgtcctgtgctaccctcgccaccccccatgctccacctgccccaggcccaagtccacgagaaacacttctgccgtgcctgccttcccatcccgggttctgctcccgtgcccacgtcctcatcccaggttctgccattgtgtctgcttgctgtggattgaattgtgtccctcaaaaggtgccgaagtcctgaccgctggtacatgtgaatgtgaccctatatggaaatagggtctttgtaggtgatcaagttaagaggaggctgttaggataggccctactgcaataatgctttgtatccttataaaaaggggagatttggacacacacacacacacacacacacacacacacacacacacacacacggagaagctgtgtgaagataaaggcagagctcaggtgaggccactgtaagccaaggaccccaaagatagcagcagcccacaggagtgaggggagcggggtgagacagtgcccctcgcagcctcagaaggaacccatgctgtccactgtccacacctcgatctcagacttctggcttccaaaaccatgagacacggaatttctgttgtgtgaccagccagtttgtggtactgtttgtcatggcagcccaaggaaaagaatacattacagcatacaaaccatgactcacattatctttacttagaacccaaacaaacctctctccctaagctttcaatcacagaggcacatgatcttgttcagcagcctagaaaaccaaggcccagcggagccacccgtaggcacccactccccatagcctggcacacacacacggcagagccacccacaggcacccactcctcatagtccagcacacacacggcagagccacccgcaggcacccactccccatagcccggcacacacgtggaccatgccaccctccacgtgcgcctggggagcaaagcagcacagcctgaactgcccctcagctcttcctcctgagtctaaaacacgcacatgcgccccaggccaattccaagttttgtaaactgagcaacagctcttgggaaacaaaaacacagctactgtttattctcctggagctggctgtacaccccaacaaggaagggagggcttgctgagcctcctgtctggacaacatgcaccaaggaggagtataaaagccccacaaacccgagcacctcactcactcgctcacccactccctcccatctcccccagctcaacccccagcacagcagcatccaccatgtccgtctgctccagcgacctgagctacagcagccgcgtctgccttcctggttcctgtgactcttgctccgactcctggcaggtggacgactgcccagagagctgctgcgagcccccctgctgcgcccccagctgctgcgccccggccccctgcctgagcctggtctgcaccccagtgagccgtgtgtccagcccctgctgcccagtgacctgcgagcccagcccctgccaatcaggctgcaccagctcctgcacgccctcgtgctgccagcagtctagctgccagctggcttgctgtgcctcctccccctgccagcaggcctgctgcgtgcccgtctgctgcaagactgtctgctgcaagcctgtgtgctgtgtgcccgtctgctgtggggattcttcatgctgccagcagtctagctgccagtcagcttgctgcacctcctccccctgccagcaggcctgctgtgtgcccatctgctgcaagcctgtctgctctgggatttcctcttcgtgctgccagcagtctagctgtgtgagctgtgtgtccagcccctgctgccaggcggtctgtgagcccagcccctgccaatcaggctgcatcagctcctgcacgccctcgtgctgccagcagtctagctgccagccggcttgctgcacctcctcctcctgccagcaggcctgctgcgtgcccgtctgctgcaagactgtctgctgcaagcctgtgtgctctgaggattcctcttcatgctgccagcagtctagctgccagccggcttgctgcacctcctctccctgccagcaggcttgctgtgtgcctgtctgctgcaagcctgtgtgctgcaagcctgtcggctctgtgcccatctgctctggggcttcctctctgtgctgccagcagtctagctgccagccagcttgctgcacctcctcccaaagccagcagggctgctgcgtgcccgtctgctgcaagcctgtgagctgtgtgcctgtttgctctggggcttcctcttcatgctgccagcaatctagctgccagccagcttgctgcaccacctcctgctgcagaccctcctcctccgtgtccctcctctgccgccccgtgtgcaggcccgcctgctgcgtgcccgtcccttcctgctgtgctcccacctcctcctgccaacccagctgctgccgcccagcctcctgcgtgtccctcctctgacgccccgtgtgctcccgcccagcctgctgaggcctccgctcaggtcagaagcccagctgctgatggacacgccccccagtgccagccaggctcaggtcccacctgaaagctgatagtcgcgtcctgaattgctcctgcactttgaccatttcctggtgtctgctgttgagctggacaatggaagaactgaaagtctatactcaatgctgcagccctcttgcggggggaggggggcgcttctagaaagttcccatggcagtggcctcccctccatatctcccacctctcatgagggtcagctcagccttgacccgtgaggtctctgtcctcctggctcagagccgcagagccttctttggacgccctcaagctgaccaataaaggccctgagactgcaatggcgctgacacccaggtgtgttgattaatgccttggctggagctcacggccatggttttctcctttgtgcacaaccctctgctgtccttcaggcccctgagtgttttcctgtgcccaggggcgtgtggttcccaggggtccaggctagacggacatggacgcggggagccttgcagccctttggccatttcgggcccttgggtttgtccctaaccctcctgtgttgttagtcgtgtcatagttctttttgctgatttgctttttaaattatccttctgctgcacaatacttgtcaaataagaatggtgtcttctagcgccatgcttgcccagagtgtgtccaaatgcctccctagcttcaaaatcagtagtcttcatcgacattgcctaaaacctcttgtgccctgtgcagacatcactggcgtggtgggaggaacacagacaggcgattggaattgggtctctgtcgcttcgcttccaccctgtgtgagcagaatcatctcctcgaccctccggcctctctaaggtcagggaagtaggactccctctttcaggtttccaaatggagtggcaagaacgacagacagagcacgtgtgaccaccatgagcccagggccagcggactgcccagagcaggatggtctgaggagttttgggcattttaagaagtctttaaaaattatatttggaataatgatgtgttgtaaccactggaagaagtgccaactattccaatggttataaaacatactcataaagcaatgacgataagatcagaaagaatttccatgcataggtgtcagagggtggcccgggaactcagccgcagtggaggtggagttgtgaggacagacccagagcactggccacacggagtcacagtcccggagtggaagggagtgcataactcatgggtgaacagacacacggatgtcccagggtgggtgagggggcataactcatgggtgaacagacacacggacgtcccagggtgggtgagggggcaaacctcatgggtgaacagacacacggacgtcccagggtgggtgagggggcaaacctcatgggtgaacagacacacggacgtcccagggtgggtgagggggcaaacctcatgggtgaacagacacatggatgtcccagggtgggtgagggggcaaacctcatgggtgaacatgcccatggttttcagcaacacaactcaatgtgttgattgcaacccatggaagcagagagttaaaaataactccagagaaggggactctgtggaagagtcttcattaaactacagtgctgtttcccttcacgtgagctgagaacactgctggttgaggtcctttgtgtctttaccaaacctcactctgtcttcagaaagtcattttccaggaggtgtatagaaaagttgagaaaccactaaaaaccaagccgacttaagggatatttatacaaaatcccatccaacaacaatgggatgcatgttgtttaaagtgcacgtggaacatccaccaacataaaccaccggagaggcctgagagcaagtctcagtgtcctcaggagggatgaaatcacaggagggctgagcatgctgcttggccacacagaattggaaatcattaacagaaagacacttagaaaactgccacatacttggaaattaaataacacactttaagatctatgagtaaaaatataaatcacaatggaaattatgaaatatctggaataaaatgaaaatgaaatcaccccatatcaatacttgtgggatgcagctaacaaagcatgtagaggaaaatgcatagtaatttgttttattagagaagaaggcctaaaatcagttgtccgagcttccagcttaagaagctaaagaagcatatgttgaacccaaaaataactagaaataataaaataatcaagaatttaaaaactccactgtgtttgtccattttgcactgctgtaaaggaatacccgagactgggcaatttatgaggaaaggcccacggttatctggctcctggttctacaggctgtacaagcatggcacctgctgagcttctgctgaggtctcaggaagctttactcatggtggaaggtggacggggagcaggcatcacatggtatgaggggagcaagagagacagagaggagggagtgccaggctcttgtaaacaaccagctgtccatgaagtaacagagcaagacttcactcattattgtgggggtggcaccaagccactcatgagggaaccgtccccatgacccaatcacctcccaccaggccctgcctccaacacgggatcatggttcaccatgagatttggaggggacacatatccaccatatcacctaccaaatagaaagtggacaaacagggaaataaataaaaccaaacctagtttttttaaagacaaatgaaattggcaaatttctaactttactggtcattataaaacaagagaacaaataaattaccaatatcggatgttatggtttggctgtgtccccacccaaatctcatcttgaattctcacatgttgtgggaggcacctggtgggaggtaattgaatcatgggagtgggtctttcctgtgctgttctcatgatagtaaataagtctcacaagatctgatggttttatacaggggagtttccctgcacaagctctcttctcttgtctgccaccaagtgaattgtgcctttcaccttccaccatgattgtgaggcctccccagccatgtggaactgtgagtccattaaacctctttcttttgtaaattgcccagtcttgggtatgtctttattagcaccgtgaaaatgaactaatacatcaggaatgaataaaaggttgccactacagaatctgtagatatttaaaggaaaccaaacaaataatgcaaacaactctatgtcaatacattcaacagcttagatgaaataggcaaatgactggaaatgcatcatttatgaaaagggatacaagaagaaatagaaaatctgaatagccctctatcaattgaagagactggactcataattaaaacccttcccacagagacaatgccaatcccgaatggctttgctattgaattctaccaagcatttaggggagaaataatgccaatctaacccaaacttttccagaaaaccgtggggtagacacagtgtcggcgagcgtgctagggattaggggacggaggctgaggcctcacgggtggcagggacgcccttggtgggctctggccatggacacagactcctgggatgagagggggactcatggaggaacagccacgccttgaccctgagatggccttgcagggagggtaactgaaaatttacccactggggacagttgcctacttactaaaacagttccagccaccaccgcagcccctggaaggccatccccccagaaaatcccccaggtctcagcagggccttgtccacctgtgccctccagtgtcgcccatgtcaacctcacctaagaggggcctgacgcacggtcctgcaggtgcggactctgggtcctgacagcccatgcggaacctggtgcccccagaggagggcctggggcagtgccagttttggggaatcatgtgcatccatccacccactccatgatgctttcgtcctgatcgagtcccttgtctcccgcgcaggtgcagcagcccctccctctccccccgcattgctgctgaacgggcagaaccctcgggcgggcggcacacagggagggtgaccaggcctggaggctgtagtgcccggaccccaggccagcttcctggaaggtgaccctgcagggtgggctctcccaggtgggacagtgggtgggacagtcctggggcctggagagccccacagcccagggcacggcagccaatgaccaggctcaggaagacccaggcatggaggctgagccgggactgagccttcctgggcgtggctgtgagttccacctggtgaccccctggaggagttaggccactgtcccccgtgacttctaggttaagtcactcattcatagaaacagtcatggctagagagcaatctgagctcaaaaccatgtatccccaggagcactacagaaaaagagaatcaggcgaccaaggggagtttattggggagcaggaggaggtgctgacaggttcaagtcgaggccaagtgacctggggcagagaagctgggagggaggacaggggacccaacaggcaggtgggcccctgctgggaggcaggagctggggagcttcgaggatggagattcctgggagtatggaggggggggtcacctcagcacatgggggccccgtcccaagcgggggcaacctcctaacccgagtcaggaccagttggccctgggggatgtgcacatcagcaactggactcctggcctgagcagaggcctcagcaggccaggcgggagcacgcggggcggcagaggagggacacgcaggaggccgggcggcagcagctggcctggtaggaggaggcaggggcacagcaggaggagatgggcacgcagcaggcgggcctgcatatggggcggcagaggagggacacggaggaggagggtctgcagcaggaggtggtgcagcaagccggctgacagctagactgctggcagcatgaagtggaagccccagagcagacgggcacacagcagatgggtttgaagcagacaggcttgcaacagacaggcacgtagcaggactgctggcagggggaggaggtgcagcaagtcggctggcagctagaatgctggcagcatgaagaggaatcctcagaacaggtgggcacacagcacacgggcttgcagcagacaggcacacagcaggactgctggcaggaggaagaggcacagcaagttggctggcagctagactgctggcagcatgaagaggaatccttagagcaggtgggcaggcagcacacaggcttgcagcagacgggcacgcagcaggcctgctggcagggggaggaggcgcagcaagccggctggcagcacgagggcgtgcaggagctggtgcagcctgattggcaggggctgggctcacaggccgcctggcagcaggggctggacacacagctcactggggtgcagaccagggtcaggcagggggcggtgccgcaggggggctcacagcagctctctgggcagtcgtccactcgccaggagtcagagcaagcgctggagcagacggacatggtgcacgcggccatgctggggtggggaagacgtgagctgggagctgggggaggtgtgagtgagtgagtgtgtgagtgagtgaaggagggagtgagtgagtgaggtgctcagggctgtggggcttttaaatccctccctggcgtgtgttgtcctgacaggaggctccacaagcttctcttccttgttggtgtttagagctggtggctggagatgcgtcattcatgctggtttatctgtttgtttttccctcattaaacttgtgtgtatgttgcagggccgtgtttcttcatcggttcttattttagccccagaaatgtggtggaaaatatttcaagcaaacttttgttgagtagaggttttagagatgaagacttctctaaagggaggaattctagtttcacctatcctgtgtttggactgattggatatattttattacttttagcatattaaaatataaataggtagaaaaatatacatttcttataaaatgcagctggcacagagggtacaatgaagctaagtggccctctcttcaaccccttgtgcctcgtaaggggaatgctcagagatttggtatctggtggatctgtgctttatccttgtctcttcagctcttccatgccaccctcagagccctctctctgttttatttgaagctgcgctctgggttttctccatttttatttcctcatggtgacagatcaagtactttttcacatatggtgattttaggacatacattttaagatttctttcttgcctaaaaatgtactcaactttaccctcacacttatatgatagtttagctgggtatataattctggttttaagtcagaattattattataaataataacaaaaaatctgttttctcaaaatgatgaacctgtgtcaccatttttctgtagtgtccagcgttgctgatgagagactgaggttggtcatttgtcattttttatagtttgtctctctctctccgtttaactctctgggaacatttggttttctttttattcttcttttgtttctatgcgtgtgcattattttactttctgtggttagaattcattgagcctttcaatgtggagactcaggaagtgttttgcgctcttaaaaataactcttatctctcaaggtctttccttttgtgactttaattttgtctcacgatgaatgaaatacatttttggctcactgtaatgatgttatgttgagcatttaaacgtttttcccctcgtttcactggacatcagttaagctctgctcattggtggcagttcatttgattttctgagtaaaagactattttattccagggcattggggtcctgatccagtttacattctaatttgtttccatctgtttctcttttctacaaatatataaaggattttaaagagcctccctttttgttagacaattttgattttattttttataactctttgaatatcctttcagtgattattagtagaggttgtgcgagaactgtgtgcttaacccactttctgggactgaaggactcgatgctcctttcaggaaatgacaggaaagccaggaaggctaggatgacgtcatatcagcgggtgtgctacagacatgcacggcgcaggtgcggtctccacatcagccaccgcgtgagtggtgactctgcagcccattttgacagttgcagaaatgatgagagaagataagtaaccttgaaagaggacagctggccagcagtgaacctgacaaccgcgagctctcactcctttccctcaccgccatacatggctccgttctgtcacacagctcccagaagagtgcgtgcttcctgagtggcaggcagggagggaggtggtcctgagccagcgggatgtggtaaggctgacatggcttctgggacaagccctggggcctgtatgataatttgctttagttttcccatcgctatctctggcagcctccttaatcgaatgggtgtggtgattccttgtctctttattcctatttgtgatccacgccctctgtcgctcccttctcctggtgtctggaccacccatcactgtccaaagtgtctttccacagtcattgctgtgcccacaacagctccaggatctcagtgtgcctgatctaagtccacgccctgcgctcagtggagacgtgtctttttggatcatggaaattttcactgggggccaccatggcagtttccacggacaattgaatgatcacaccaatttctttctttctctctttctttctctttctttcttttcttccttctttctttcttttcttttcttttttgacacatagtctcactctgtcacccaggctggagtgcagtggtgctgcaggccccacctcccgggttcaagcgattctcctccctcagcctcccgagtagctgggattacaggtgtgtgccaccacatccagctatttttctttctttctttcttttttgtatttttagtagagatggggtttggccattttggccaggctggtctcgaacttgtggcctcaagtgatccatctgtttcagtctcccaaaagtgcaggcattacagatgtgagccactgcacccggccagatcacatcatttcttaaatcaagcagacactctggggatctgagctgagctgagctgcagggattaaacagccctggctgggggagggaggtgctgggaggggatgtgagtctggagggcagggtggcccacggccgtgtcttctgcaagtgacacacgtttggattcttcttttccaaaatgtagtcttttgttttatttgactccctttcatcgtggctggctgcccagcacaactctggagacgcgatgacagcagccctctggtcttgtttccaaagttaacagaagcacctcctgcagctccgcactaagccggtgttggctggtttgtcgcaaagccttggtctcgtgcatgcagtgttttttcactctagtttaccaagaattttgcctcaggcttttaaagaaggagtgagtttgttcatgtatgtgtgtgtgtgaatgtgtgtgtattaatctactgagtgttccagtggcttttctacttctattttatgagtatagttaatgataccctttgtaacttgagtgatctaagatatacattacttgataatggctcattatccctttttccccagctttattgagacgtaattgacaaataagaattatataaattcaggatgtcttgatatatgtacacattgtgtgattaccacggtcaagctaattaatatgtccatcacccatgcagttacctttattttgtgatgagacatttaaggtggactctcttagcaaatttcagtgttactgcgtcacattctgtgttacagtcaactgtccccgtgctgcacatgaggtttccagaactgactcatcctgcacagctgaagctgtatcctgtcatcaacatcaaagtggatgaagcacacagttcttgcacacctgtattaataatcgctgaaaggatatttaaagagttataaaaaatgaaaactccctgcacccccgcccctgtgaacccccactctactctctgctttgccgagcttggcttttttagattccacatataagcgaggtctgcagtatttgtctttctgtggcctgggtcacttcacctagcatagtgtgtgcaggttcatccatgttgccactaatgacaggatctcccttctttctatggctgaatcgtattccatcgtgtgtatacaccacattttctttatccactcatctgctgatgggcacttatgttgcttccatatcttggctgttgtgactagtgctgcagttagcatggcagtgcaggtatctctttgagatctggctttaatttgtcttgtatatacaagattgctcatcacgtggtagttctatttttaatttgctgaggagctttgacactgtcttccataatggctgcatgtaacagcttagtttttctttaacataggcacatagaatctcttgctttatctttttaaatgggattgatttacagtcctctctccctctctctctctctcatacacaattattcctggttttggcatcagggtctcaccagtcttatattagaggaatccagaagatctctgtcttcttctgagctctggaatatttcaagtatcacaggaaggtcttatattgaaggctgatgatatacacctttaaaacatctgagtctgccttctgaagaatatctttcaataccatttccatattttcctggacatcattgtattaaaagtttcattttgttattcagtgttggtaatttatattttttagaacacagtccattcatttatattttcaaattttaggataaacatacccatgctactttcttttacataaaaacaaaaatctctgaatctgtgggcatgtttctttttcaatctttaatgtctgcttatttttattagactgtatttttattttctttagattttccttgatgagcatctgtggatttttgtggacatttgaaaagagggggtcgtgctccttcttgttagagattgttgagtaaaagtttcagaaagcgtcatgggtggtaaactttctggatccctgttgtttaagaacagccctcctcctgacacctgccacagcagagtctaggtgcagaatttcttccctccaccttagtagaggttgggccaccagtgtgtctcagatttgcataactttaatcttcttgtgaagcttttcctctttccagaacctggcactattctctccttgtacttcattcatttcaccagacccctccctagtcactgtcatcagctgtgttcatcccctcggtcccatcttcttttagttcaaggaacttttattcccatatgggtttgatgattttcttccattcttggcttctctccccactgtgatcccaggatcacagaccctgagtctcctgggttcatctcccttagacctcaggcttttcttggcttcatctctttgtccttctgcattgggtttcggtcattttctgaactgggggtcatggtgtcagctcttctgcctcagggtctgttatgaggactgccattgaattccatatgtttggagtgtcacgatttcagtctccaggaatccaaggtgttttcctttcttctccttctcctttttggtagcactctcttcttgtttcatggagtaacggcctctttgtttcatgcattattgtttgtttagactttgcttctctgtcatgctgtgatttcctcatgcgtctgaggacccttagttgttgttcacgtttttaagtgagggtctaaactgtttggctttcattgctgaaaggttctctgcatgtagacacatgtcttcttctcacagagctgacactggggctctcagggtggggccttgtctgccgctggctgagtacacgggctttggttcattttggcatccagaacttcctggggtgtggtctcttcctctccatcctaggacccaggctgggagcctcctgggccacccctggcctgcctggctctcctgctggactcagggcaccaggcggttcttctttagaactcaaccctcagttaaagacgcctgagtgcccatggctgtcctcatgtgctgtccctgtgtcagggtctctgggaaaagccatttgtcttcagtcctgcttctgcctttctttctgttgaattttacagtcaagaaaacccgatctttttgtcttgtctgtcacagaaaatccttactgacctggtctgcagatggcatgcctgttttctatcactgttctggtaccattcatttttatttggatgaaggggaggtggaggcattggggagtagccagcccaaacagagggcttaggcttttaaaaaaaatttaccaagagaaaattcacaagccatgaagctcacctgctgcaaggacataatccatttgtttttagcgtattcccagtgtttctcagccatcaccaatatataattttacagcattcctccctccaaaaaaatcacaccaatcagcaccactccccatgtgcccctcccccagcctcaggcacctactcatctactttctttctctgtagatttgcccatctgagcctttcatacaagtagaatcccaccaggtttcgtaccagggatgcagggatggtttaacattcacaattcaacaccacataaacagaattaaaaacaaaaatcacatgatcaatagatgcagaaaaagctttcgacaaaatccagcatctctatgattaaaactctcagcaaaatcaacatacaagggacatacctcaatgtaataaaagccatctatgacaaacccacagccaacataacactgaatggggagaagttgaaagcactccctctgagaactggaaaaatgtagggatgcccattctcaccacttctcttcaacatagtactggaagtcctagccagagcaatcagacaagagaaagaaataaaaggcatccaaatcggtacagaggaagtcaaactgtcgctgtttgctgatgatatgatcgtacacctagaaaaccccaaagattcctacaaaaagctcctacaactgataaaagaattcagcaaagtttccagatgcaaaattaatgtacacaaatcagtagctctcctatacaccaacagcgactaagctgagaatcaaatcaagaactcaatcccttttacaatagctgcaaaaaaataaaatactcaggaatatacctacccaaggaggtgaaagacctctacaaggaaaactacaaagcactgctaaaataaatcacagacaacacaaacaaatggaaacacatcccatgttcatggatgggtagaatcaatattgtgaaaatgaccatagtgccaaaagcaattcaatgcaattcccatcaaaataccaccatcattcatcacagagttacaaaaaaaattctataattcatatggaaccaaaaaagggcccgcatagccaaagcaagactaagcaaaaagaacaaatccggaggcatcacattacctgatttcaaactatactataaggccacagtcaccaaaacagcattggtataaaaataggcacatagaccaatggaacagaatagagaacccagaaataaacccaaatacttaccgccaactgatctttgacaaagcaagcaaaaacataaagtggggaaaggacactctattcaacaaatggttctgggataattggcaagccacatataggagaatgaaactggatcctcatctctcaccttatataaaaatcaactcaagatggatcaaggacttaaatctaagacctgaaactattagaattctagaaaataacatgaaaaatcccttctagatattggcttaggcaaggatttcatgaccaagaatccaaaagcaaatgcaataaaaacagagataaatagctaggacttaattaaactaaagagcttttgcatggcaaaagaaacagtcagcagagtaaacagacaacccacacagtgggagaaaatcttcacaatctgtacatctgacaaaggactaatatccagaacctacaacaaactcaaacaaattatcaagaaaaaaaccaaacaatcccatcaaaaagtgggctaaggacatgaatggacaattctcaaaagaagatatacaaatggccaacaaacataggaaaaaatgcttaacatcactaatgatgaaggaaatgcaaatcaaaaccacaatgggataccacctcactcctgcaagaatggccatcatcaaaaaatcaaaaaataatagatgctggcacagatgtggtgaacagggaagacttctacactcctggtgggaatgtaaactagtacaaccactgtggaatacagtgtggagattccttaaagaactaaaagtagatccaccatttgatccagcaaatccactactgggtatctacccggaggaaaagacgtcattatacaaaaaagatacttgctcacgcatgtttatagcagcacaattcgcaattgcaaaaatgtggaaccaacccaaattcccatcaatcaacgagtggataaagaaacttttatatatataatatatatatatttatttatatatttatatatataaactgatatatatgtgtgtgtatatatgtatatatatgttatatatatgtatgtgtgtatatatatgtatgtgtgtgtgtatatatatatatgatggaatactactcagtaataaaaagaaatgaattaatggcattcacagagacctggatgagattggagattattattctaagtgaagtaactcaggaatggaaaaccaaacatcatatgttctcactcataagtggaagctaagctatgaggatacaaaggcataagaatgacacaatggactttggggactgagagggaaagggcgggaagggggtgatggataaaaaactacaaatagggtgcagtgtgcactgctcgaatgatgggtgcaccaaaatctcacaaatcaacactaaattactaatccatgtaaccaaacaccacctattccccaataacctaaataaaatataaaataaaaataaaaaataaaaaaccaaaatagaatgtcaccacatgtgggctctcactaagcatcatgctttcaaggctcatgcatgttgtagcctgtgtcagtattggattccttttcatggctgaataatattccccacgggaatgggccacattttgcttgtgtggatgggctgtgttttgctttgtcctctgatggacatttaggcttcttccacttcttggctgttgtcagtcatgctgtgtacatgggtacaccagtctctggctgctgtcagtcatgctgtgtacatgggcgcacaaatctgtgtgtggacatttgtttcattcctctgaggtagatgcctagaactggagtggcaggatcacagggtcactttgtgagtgaccattttgagggacggttttccaaggtgctttcactaggagttgaagctctgatgaagcagaagacacatcgaatgaggacccagagcaggggtcagaggtgagacccccccaccaggagatgtcctccctggggatggccagacaggctgggtcctgtcggtgcctcggacgagggcaggtggggacaatgacaaacatggaggaggtcagagagccagccccggcccctccacctggctctctgttctgaccttgtagccatcagtgggcatagtgaggtgggtggggctcagacacgcatgtgtggggagcccctccccaggatggtcctggagccctaggatgaaggctcggcccctgccagctacccggagaaccagggcaggaagaaaacatctctgcccctggaggctctcatttgtcccttcatggggacgtggctttgcttccaaggaggtggacaaggctgtgtcagtttggcctccggccctggggacggctgctgctggctgtcctgggtctgcctggaggggagtgagcgaggcggctgtgctgaccacagggagctccatggggtgggactccgggaggtcctcctgctggtgctggtcgcctctggcgttgacatgcaagggtcatttgctggggcaggaggcagacctgggctctcaaatgcacacagcgacctggcagaaagagtgcagcggctcgtaccactcgcccaacgcggtatcgtggaccacgtctgagtgccagagcggagggtggcagacagagctgagggctatttgggagagacctgggaggctgggggtgcggggacagggtcctcggggtcagagtccaggaccacgggaccaaaagggagccaggaccctgaaagtctaggcgaggccgcatggggcaggggggcctgcaggcttggttagtgggtgccatggtccctgcccatctgtgttctcgccagcgatgcctgagcaatgggtattccagaaccccacgaatactgggctgctgggctcgagtcctgggggagggcgtggtccccatgtcttactgtggaggagatgagggctgcagggatgggcactgtggtccatagctggtctccccaggggtaacaggaggggtgaggctgctggctggagctaggccccgggtgggctaccccagtcctggggggcagccatgagctggggagggtgaatgtggctcaggggcccagagtgctgccagggtccactttgtcccgaaactcctggccttggttccagaggcagctttcctaagatgggccggggggccacgtgctggggttgggggcccacggggctaagagggagactggccttcagggttcacagaggccagcaccagaaggcattgcttcctgcctcatcccatgcccctcgggggtccacagacaggatgaaaagtcgacagagacagaggggtggagccaggcctgctgggggtcaggactctccctgcagtcaggggtggcatcacttcccacctcaccctgtgccccccgggggtccacagacaggacagacgttggtgtgagacagaggcggctttattagaacgagagggggtgctgcccagggtggaaccaggcctgctgggggttagttctgcagaatttgggtctgggggagtagctggggtctctcatgcagccagcatctgggaaggacagggggagcatcctggtccctaagacaaagagcctgccccatcttctgagggtgtcaaagccagagagggcagagcttgctggggcagctgggaggtcagcccctggtgggaagggactccggatcacatccagggctgtcagcagctggacttctggccagagcagaggctgtagcaggcagggcgggagcacatggggcggcagaggagggaaacacaggaggccgtgcggcagcagctgggctggcaggaggaggcagaggcaccacaggaggggacgggcacgcagcaggtggacttgcacacagggtggcagaggagggacacggaggaggagggtctgcagcaggaggcggtgcagcaagccggctggcagctagactgctggcagcatgatgtggaagccccagagcagacgggcacacagcaggcgtgctggcagggggaggaggtgcagcaagctggctggcagctagactgctggcagcatgaagaggaatcctcagagcaggtgggcacacagcacacaggcacgcagcagacgggcacgcagcaggcctgctggcagggggaggaggtgcagcaagttggctggcagctagactgctggcagcacgagggcgtgcaggagctggtgcagcctgattggcaggggctgggctcacagaccgcctggcagcaggggctggacacacagctcacacagctagactgctggcagcacgaagaggaaatcccagagcagacaggcttgcagcagacgggcacacagcaggcctgctggcagggggaggaggtgcagcaagctgactggcagctagactgctggcagcatgaagaatccccacagcagacggacacacagcacacaggcttgcagcagacagtcttgcagcagacgggcacgcagcaggcctgctggcagggggaggaggcacagcaagccagctggcagctagactgctggcagcacgagggcgtgcaggagctggtgcagcctgattggcaggggctgggctcacaggtcactgggcagcaggggctggacacacggctcactggggtgcagaccaggctcaggcagggggccggggcgcagcaggggggctcacagcagctctctgggcagtcgtccacctgccaggagtcggagcaagagtcacaggaaccaggaaggcagacgcggctgccgtagctcaggtcgctggagcagacggacatggtggacgcggccatgctggggttgaactggtggagggtgagggagtgagcctgtgaggtgctgaggctctcgggcttttattccacctggccttgttgtccccgggcccacagcttccccttccgtgttgccgagagctggagtctgccgggattaggggtgtttgttcgcctgtgatgtgggccagctcataaatctcccatcacatctgggctgtgtcccatcccatgtggatccctgggggcaggaattgggcggggcctggtcccagctgggttcggggagctgggagagccacaggtcgcggcatcgtccacccctggccccagcagccccgggacacagagcccctctgcaggaagccggcctcaggaagtgtccttgtggtgaaaacccctcatccagcgtggtccttcccccatcaccggacacaggactgtggccatcttctgagggacaacctggggcccatgagccttcattgacctgccctgggccatggcatggtgggggtggggggcagctgtaactgtgcccagacctcttggctttgagctctggacgacttctcatccccacagcctcttcacctccggccctgtttcgtgtccacctcgtctttgtgttttggaggcagcaggacctgtgtgttccagggcaaggacggtgggcttggcccctccctgcttggacagcatgacagccttctgggctgtggttttgggttctgaacctgcagagtaaccgtgctgagcagcgggcggtcagcagccctcgtccccgcctggggtggctcctctgtgtgctctgcttctccgaggctgcccgtcagcccccacccagcctcctgctgggcccatttcccagccctgtcttccaagccctgtgccaggcctcttagtgtcaccaccttaaaattaagggacatctgtccaaagaacccgcacagaagacacaaaatgggtccatgagaagttgatctcactgcaaacccattgccagtgtaaacgaaacataaaatcctaagcccctcaactgactaaatggatcccatcttgcccacggggacccccgaaaaactgcgttcctggccatgacaggaagggaggtcagacacgcctcgttacaccccctccctttagggtttcgacacaaccactacccagcactaaagttaaaatagagaccgtaagacccacagagcagactctggcaataagatatcaaattacaaacaggacctcaggccgcgccaggcaagggacaagccgcgtgccctacactgagaggacggactctgctctcacgccacagctgctgtttttctacagtggctaaacacgcactggccccgcgatgaggatgagcaaggttcaaacgactgcagctcatccaccggcagatgccaactgaccacgttccacagccatgaccacagctctgactgggcaggagactgacttcaggaacctcctcctgataagggacccccaaccatggactggctccagccggtttacagaggctgtgcactggagtgcctttgtgtcctgagaagacttctgaggtttagggcctcattgcgacccattgacatgataagactccaccctgtaagaagtacatttcaagtggtccgtattcagaaaacaggccctggcaagtccaggcagctcccttgcagatgtgacaagccacacagtacagacacctgggaagagtgataagactcacagaagtcagaggggaggaagaaaaagtgacggatggctaacacataaaaggaaagaaacttttgccattgagaaatcaaatgtaaagtggggaaggggacaagatgtaaccttataaggggataatgaaacttaggtgacgtccaggaagcctgtgaccccatagtactcaggctgcgaggaactgggcgagggacctgcacactaggggataaattgcttgttgaaagtgtgctgggtgtgcccgcccatcagacaccagatcttgcaagaccgacattaaagtctcactttcactgttcttcatgcctctaagtccattctttggatttggacgggtcagtgtgtttctcacaaccgcagagtgaaaacaggtcgtatgttacatgcatgtttgttcagttcctccttcgtgaatattcactattcctccataacctattgcacatattgcacatgtgtattcagccaacctggtcagcgtggagctcctgccccagcccctcctcctggctctcgtcttggccagaggctgagcttcccggcctgcaggatggctttcttgcaggctgtgcccctttagaagaaacaaagtctcctctttttttccaaacttacggatctgtgatttttttttttttttttttgagatggagtctcactctgttgcccaggctggagtgcagtggtacgatctcagctcaccgcagcctccacctcctggttcaagcaattctcctgcctcagcctcccgagtagctgggattacaggcataagccaccatgcctggctaatttttgtatttttagtagagacagggtttcaccatgttgaccaggctggtctcaaactcttgacctcaagtgatccacctaccttggcctcccaaacatgctaggattacaggcctgagccattgcacctggccagatggtgatttttttaaatgaacacaagcagtcacccaattctcttctcaggaagcagctactttcacccatttattctctttctctctgtatctctccatctctctctgtctctgtctgtctgcctcttccgtatatgcacacacacagcccattctcattattcccagaggctctgttctatacagtctccaccagcaccgaataaccaaatactgaaccactgctcctacaggaagcacagggttatggtctcatgagcctctgatcacaacattcccatcatctaatcaatgcatagacatgtcttacgaatgcttctgtctgaagacaccttactgaatctatatagttgatttatcaacactgagccccagccaacagccctacagagcctgaatgaagttggttgaacacatgtgttttctctgtaagacgtgctggagccttctgagctccggacacccagcagcacagcagcactgcactggggcactttaaacaacaagatcagagcatcgtggaggaacgtgcggcactgaggagaacataacaaggacacctgtttaccatatgcgagctgagacaggaaagcaaaacatcacctcattctattatgtgtatgtgtaaacatatatgcacatacacatacatacatataatgcctctgtacacataaatttttaaaatgcaaattatgtcatactctacccactatgtttctgtaaacatggagctcctttcctgtgaatacataatgatctctgtcttgtttacagctgcatagaattccatgtggtctgtgtgttcattttctattgctgtggaacaaagtaccacaagcttagtggcttcaaataacacacatttatcatctcggtttctgtgggtcaggagtccaggcacagttaaattggggtctctgtagggctgtattggagtgtctcatgggaaggttcaattggagaaggatccacttccaagctcatgtgattgttggcagaactcagttccttgtagcttcttggactaagtgcctcagtttgtcaccagctgtcaactggaggctgccatcatctctttccatgcggcctcaatgggcagttcacaatgtactggctttttcacagccagccagggagacagagtcctcccaagacgagcattatgacctcatgtaatgggatcatgcacatcccatcaccctctctgtggctccttgtgtctatacacgtgtcacagtcccaaccacactcaaggagtgtggggcacacagccagtgaccactaggaggtgagggacatggggccaccctagagtctgtctcccgctgtctggacaatgtcatggctgtgatacctttgcacataccttgtatccacccaggagtatctacaggatgcttgcttagtgattcaggcttaaaggcatgaggttttgaattgtgatgtgtagcagcaaactgcctgccaaagccgtggagcaacctcagcccagcagcaagtcatctgggtagtctgcccacaccctcgccaacccatgttgggaacatcaatggttttcattttttccaatataaaaaatgatatcatatggccattaaatttgttttatctcattttaaatggggctgagcacgttttctcatttaagaaccatgtatatttctttcaattgtctctgtatcctttgctcactttctgttatgtttctgttattgatcttaataactcgtgggagctctttggatattaagcaaattagccctttctctgatatacagataggaaatgtgtttcccatattgttgtcttttgacttggtttataatgttttctctcctgcaatttaaaaatttttacgtaattagttttatcggttttttaaatggctttggtgttttactcaaaacttagaatagccctttccactctgagatgatttttcttttccttcctatcattattgacaggtgtattaacatcccccactatgattttcccttttctctatttctacttttagctctgccagttaaaaaaattaaaaaacagttttttattttaattttttaattttatattttaagctatgtaattagatacatgcagatttagaattgttacatcttcctggtaggttgactcttttagctttatacatttctttcttcatctctattgctctaaaatctactttttctgatattcataagtcacactagcattttagttagtgtttgtgtggtgtattttcttccatcttgttactttcaagctttctgtgctctttttctttttctttttctttctttctttcttttttttttttttttttgatggagtctcactcttgtcgcccaggctggagggcagtggtgcgatctcggctcactgcaacttccacctcctgggttcaagcgattctcctgcctcagcctcccaagtggctgagattacaggtgcccaccaccatgcccggctaattttgtatttttagtagagacagggctttaccatgttggccaggctggtctcaaactcctgacctcaggtgatctgcctgccccagcctcccacagtgctgggattataggtgcgagccacagcacatggcctctatgctcttgtattcaggctctgtatcttgtaagcagcatgtagttaggttttctactttttattcagaccaacaatatattttaattggaatatctgatactttattgactgatgatttagtttatatctatctgccatctgactgtacaatttctatttgtcccaattttttaacgtttcttttaaaaatcacttcctgtctattttggattaatcaagtattttttattatttattttccctcttctgttctattcattattcgtgagataaggcaaggcttctcttcaaacaggctgctcaaccttttgttctttaattcctagtacccccgccccctctctttcttctccttttcttctttctgactttactacatgcccaggcatgccgcaacatcactggcattatcagcaccagctcgcattccgttctgtatttaggaaaagactggctctttagtttcccgtagatgaccccttcctcctctcccgtctctcccattatgcatccattttatctaagaaagtttaaatgtttagccaatcgggtctagtttaaattgtgcggcgcaatcccagccaatggggaaaggacacaggggcaggatcacgttaggaataaaaacttctactctcctttgttctgtgtgctctcgtggcaaccagccatatgggagacaccctcctgcacagacatacatttgctttgctgagaaatcctttgtctcagtgctcgtttttccttacgactctgagccttatttctaacattattgattatacattgattatacacagtttttactatctcttccgtggtcactttagagattatagcacacattcttagattattcaagtgtaacatatgtcagcacttccaccgcttccaaaacaatgctgaaaccttagaaaactttcactccatttatccttctcaccttttattgttaatgtcatcatgcattacttttctacttctagtttagaccccacaagagattataaatataataatattaccctttcagatcctcctggttccttcctgcatttttatccttccgtcatcctgcctaaaaaaatcccctttcatagttactgtagagtaggtctgctcgtgttcagtttgctcagttgttatccagaattgttttgtttcatttttcacctttgaacaatgttcttcctggtctagaattctaggtttgcagtgattttctttcagctctttaaagatgtcattctattacctttagtttcttcaacagctcttttaggagagctttaaaggaatcatttttaaaacattttgttcagcttttcaagttgttctcagcaggagtatatgtctgacatagctactttgtcccatatggaagcagaggcccccattctctctctctctctctctctctctctctctctctctcaatgtacttccatcctgtaggaccagatcctgtacctctggagggaccaggccatgctcaaatttatattatttttatagttcaaaatatacagaaagacaattcatcccaccgtgtaactgaatttctagccctctgaggccttttgtacttttcctaaatcccctaggagttaagaggcctggactgggaaacacagatagagacacaggacaccctgagcctctgagacttgcctgggcatcaaaccccaccagaagggcccctggagccctctcccctgggtaggggccacttctcagggccgcatgcatgctgggctatggctggtcatcactgacatcaccaggcaccaagcagcccacctccctccctggtggggtccacagtcagggttactaccccttcactttcacattctcagcacctggtgcaatttccagcatgtgggaggactcactgcatcatgaataaatgaatgcttgagaagtaaaagtatcggatacaattggaaacatttagcagaaacaaccaaaaagatgtggtggccaattggatattatttgcagaagaaatggagacttagatcagatgtctagctggggtgaccaaggacttagctggcaatcaagaaaacacactgcaagcgaaagcagtgcttgctgcttttcacacggcagtgctgttgagagtggctgtgctttttgcggaggaggtgttctgggttagacttacaggtttgcagtgcttgggataaaaccaaatggaaatgggggccccatacagggatctggggcctccctaagtgcccagatggaagagggggtgcacggccccccaggaactactgtgaacctgacgggaaatggctcacaccactgtccaccctttcccgtttgccactcgctctaaagcccttggggggacttcatgcaccagagagagtgtggggagtcacttctaggaatgttccaccctcatgccatcattgacagaggcctctctagcctggcattccagaagccacagccacccagacaagcagagtcccctggcgatggcccacaggcgctgggattaggatggatggatctctcctgcagccagcacaggcccctgggacactctatttgcagacattacaccctgtctacttcaatattatgctctgaagccaaaggtaggtgagggtgcgtcaacggaaccaaatatagactcaggactttacaaactgaacggcgtctcataggactaaacatgaaactcgcactaataagcgttctctaggttttaaacacaaacaaggaaggggcaggagttgttgacactccagctgggacaacagaccagggagacatataaaagccaacatccctgagcacctaacacacggactcactcactcactcactcacccactcactcccatctcctccagttcaatccccagcatggccgcgtccactatgtctgtctgctccagcgacctgagctacggcagccgcgtctgccttcctggttcctgtgactcttgctccgactcctggcaggtggacgactgcccagagagctgctgcgagcccccctgctgcgcccccagctgctgcgccccggccccctgcctgagcctggtctgcaccccagtgagccgtgtgtccagcccctgctgcccagtgacctgtgagcccagcccctgccaatcaggctgcaccagctcctgcacgccctcgtgctgccagcagtctagctgccagctggcttgctgtgcctcctccccctgccagcaggcctgctgcatgcccgtctgctgcaagactgtctgctgcaagcctgtgtactgtgtgcctgtctgcagtggggattcttcatgctgccagcagtctagctgccagtcagcttgctgcacctcctccccctgccagcaggcctgctgtgtgcccatctgctgcaagcctgtctgctctgggatttcctcttcgtgctgccagcagtctagctgtgtgagctgtgtgtccagcccctgctgccaggcggtctgtgagcccagcccctgccaatcaggctgcatcagctcctgcacgccctcgtgctgccagcagtctagctgccagccggcttgctgcacctcctccccctgccagcaggcctgctgtgtgcctgtctgctgcaagcccgtctgctgtgtgcccacctgctctgatgattccggttcatgctgccagccagcttgctgcacctcctcccaaagccagcagggctgctgcgtgcccgtctgctgtaagcctgtgtgctgtgtgcctgtctgctctggggcttccagttcatgctgccagcagtctagctgccagccggcttgctgcaccacctcctgctgcagaccctcctcctccgtgtccctcctctgccgccctgtgtgcaggcccacctgctgcgtgcccgtcccctcctgctgcgcccccacctcctcctgccaggccagctgctgccgcccagcctcctgtgtgtctctcctttgccgccccgcatgctcccgcccagcctgctgtggccccacctcaacccagaagtccagctgctgagtgatctccttaagatcatccaaagcctgagtgctcactgccacctgcacccctggattctttacccttgacggctctccacatcccgctcctaagccctgcagtggacatcagtggtcagctggccatccagtgtgcgcttctcctcctagaagcagctcagctgtttctccaagtcttgactttcccccaattacccagccctgcttccccagcaacaggtgggcagtgaccccagcaaggccagcgggtgctcccaggccatagcccggtgtggggagaaacgagggtagacacgtaccaactgtgggtttctcgtcactgtcccagctcagtggcgagccctgctcctcccctgctgtgggcctgggcctctttctctgtcttccctgaccacgggagcaggtcagacccttctaataaactcctttcctaaaaagtacaactggaattcattcttgttgttcacaaccaaagacccctgcctgatgccccccacccgcgggtggtcctgggctgctcccacgccacgaggtccctgtccttcccaggcgtcctggcagccctgcaccagcctcaccacacggatgtccgaggggtaggcaggactgagggatgggagaggtgagggatccaacagcagcgcctgccctgggtggggctgctttggggcctccccagaaactgggttgtgtccagcccctggctccagaaaggaaaccccatggccgtgtgcagaatgggtccacacggtgggcggggacggccatcctgaggcccgctggccgggctggcccttggctggcgtctgggaactgggatttccgaggggctccccccggccccgcctcactgggcctgagctgtttgtaccatgtggtttaggccgaacacccacatccctgctgggagtctggaattctggcgtagcccaggcagaagctgctcacgtgaccagtccccgggtacatcaccgggcagggcatccccaacatcgcacacgcagcgtcccagctgcttgcagaggagtgaggcgcgtcctgcgtgacccccaccccaggagaggcctccaaagctgagcctggtgcccctggactcggccccaggaacctttcccttggttgattttgctcagtgtcctccctgtgggaaatcacagctgtgaataccacaacctgtgtggcctgtgtcctcctggagaatcgccgtcttggggaccctgacacagaccccaagctgcccttcccaagcaatgacaatgctgtcctaggacagtgctgggtgcatttctggtagtgcttcctttgactcctgctccagagggggtggagacagagaaggaggctgggtgaggccaggccatcgtaggtttcatgaggagcagagccgacctgcgcctgcaacgagctgtccctcccctgtggtggccacagaggctgtggcctgaaactctggcgtggggctggagcaccagctggcaaggaataagcccccacatgtcccacctggcactcctctgcccctaccccggcccctgtgcagaagaaatgagccaggcttctctctggcaccagggctacaccctaagtcagcatcccaggctttgcgtcactggctcccctctggttctccaggaggcaccaaggggaccctgtggtgagtcccccaactacaggcacctgaatcccacagacggcaagatggaggggccttgctcagagaagcacgtcctcctctgcggatcccagactcggctcctcccctaggcatggccccagcaagcatccaggcatgtgagcctctggggaaacacgccccccacgccccgggtgtgaacttcaggggaggtgtgctgtggggcagaaacatcaagttcccttccaagggcaacaggtggaacttcagaacctcctgcaagaggaagggcgtgccagggtggctgagcagagagaagcagcctcctccaaggggccattctcagccgcaccacagaagctgacggtggctgaaactgccctttgtcacctggacattcaccatttgccctggtcaacaatgcctaccgccatccctggtgaaagaaccaatatctcacaaaaaatgcaaaaggcacaaatcattagagaaaatactgacaatcttgaatgcagcaaaatgcacacaaaagcataagcacacaatcaaagtttccaccaatcccatcccagagaagccacctgtggggcatcacggggagactgcgggctcactgtctccctcctgggcacgtgggctggcaggttccagccacctgcagttagttagggccacatgatgagtttctattggttaaacgtgcatggagagatgtctgccacttccacgccacaggttgtgggagccctgctgcctctcttccttgccgggctatcttggaggctcacgtgccagagagtgggtccacaaggtaggggcgcagcatgcttggatggcaatgtgaggagtggggaaggccttgtgggcttaagccattgacatgttgacttctgttggtttctgaaccagcattgatgaccttcacccacagtatgtaacaaaagattcaaattcagaatttataaagaaaacataaaaagaaacgaataaaagagatggaaatacgcaattataggataagatgtccaatggccaaaaatcacaggataagatagccaatctcacctaccatcgagacaccatgcacaaaaattaactaggggtgaaccctagacttacatgtcaaagataagataatgagatctctatataagatcacatcatcagcagagacagtctcacttctttcttttctattcagtaccttttatttctttttcttgcctaattgctctggctagaacttccagcaccacgttaaatagaagtgacaagagtgggcatccttgccttgtttttgatcttagagaaagagctttcagcttttcaccactgagtatggcatcagctgtgggcttgttgcatatggcctttatcgtgatgaggtgcgtctcttctatgtctattttcttgagagttttaatcatgaatgaatgctgaatttgttcaaatggtcttttgcatctattggggtgatcatgtgttttttgtctctaatgttagtgtgatgtatcacatttattgatttatatatgttgaaccattcttgcatccctgggataaatcccactggatcatagtgaaggatctttttaatgtgctgttgaattcagtttgctagtctttttttgaggatttttgcatctatattcgtcaaggacgttggcctgtagttttcttttcttgtaaagactctacctgttagtcttcaaactattaggactgataaacaaatttaataaagttgcaagttaaaaaatcaacatacaaaaattaatagcatttctatatactaacaatgaacaatgatccaaaaaagagattaagaaaacaataccatttacaatagcatgtagaagagtttagaaagatatttaaccaaggaggtgaaagatctgtacactgaaaactacaaaacattgatgaaagaagttgaagacacaaataaatggaacaatgtcccatattcacggattacaagaattaatattgttaaaatgtccatactacctaaagctatctacagattcaatgcaatctctatcaatttcaatatcatttttacaaatacatagaaaagaacaatcccaaaattcatatgaaaccataaaagactctgaatagccaacacagttttgagtaggaagaacaaagctggaggcatcacactccctaatttcaaaatactttaaagctattgtaatccaaacaccatgggactgacataaaaataaacatatcaaccaatggaatgggatagaaatcccagaaacaaacccaagtgtttgttgtcaatttatttctgacaaaggtgccaagaacaaatgatgggaaaaggacagactcttcaataatcagtgttgggaaaactcaatatccatgtgcagaaaactaaaattgaaccctcatcttacatcatatgcaaaaatcaactcaaaatgcatggaagacctcggcataagacctgaaatgtgatactgctagaagaaagcatagtggaaaatctccattacattggtccaggcaattattccttgaataggaccccaaaagcacacctaacaaaataaaacatagacaaatgagattgcatcaaacgaaaaagctgtacagccaaggagacaatcaacaggatgaagaaacaacccatggattgggaaaaaatatctgcaaaccatatatttgatgagggactactactcacaataaggaactcaaacaactcagtagcaagaaaataaataacccaatctaaaaatggacaaacagcctggcaacagagcaagaccctggctcaaaaaaaaaaaaaaaaaaaactacataaataaataaaaatgggcaaaagacctaaacagacatttctcaaaagaagccatttaaatggacagcaggtatatttttaaatgctcaacatcactagtcatcaggaaaatgcacattgaagatgcaatgagacatcacctcacacttgtcagaatggttcttatcaaaaagatgaaagcgaacaagtgttagggaggatgtagaaaagagggagtcttgtacattgttggtgggaatctaaattagtacaaccactacgggaaacagtatagcggttcctcaaaaaactaaaaatagaacttgcctatgatccacaaatcccacttctggttttatatctaaaataactgaaatcattcttttggggagaggtctgcactcctatgttcatttcagtcttattcacaatagcctaggtatggaatcgatctcagttcatcaattgatgaatggataaagaaagtgtggcatatatacacaatggaatactattcggccatgaaaaggagaaaaattctgtcatttgtgacaacttgaatggacctggaggacattatgctaagcgaaataagccaggcacagaaagacaaatggcatgatttgtgtctagaatctaaaactgtcaaacttagaaacagagagcagaaaggtggttaccagaggccgggggctgccagaggagaggaatggggaagggagatgttgatcaaaggaaacaacctttccatcacactggaggaaaaagctttagtgacctactgcattgcatggtgacacataaaaataatgtgttgcatacttcaaaactggtaaaagaatatacttttaatttaccagaaaaatggtaagttggtgagatgatggttatgttaagtaacttgatttcatcttttttgttttgttttgttttttagacacagtcttgctctgttgccagactggagtgcagtggcacaatagctcactgcaacctccgcctcccgggttcaagcaattcttgtgcctcagcctcccaagtagctgggactacaggtgcgcgccactacacccaactaatttttgtatttttagtaaagacagggtttcaccatgttggccaggatggtcttgatctcctgacctcatcatccacctgccttggcctcccaaagtgctgggattacagggcttgatttaatctttctacaatgcatgcacaggtcaaaacgtcacattatagatcaaaacatcacattatacctagtaaatacacacaattattatttgtcagtttaaaaattagtaaatgaacaatgaatgaaataaaaataatgaagctctagaagcacatataggggaatgtcttcacgacgttgtggtaggcaaagacttcgggaacggggtaaaaatgccacacataagagagtaaattagtaaatcggattttactacaattaagagcgtctcttcatcaaatgatactattaataccacacatccataaacatgactcagattgaaatagatgaccaataccgagtgtcagcaaatgtgtgcaggaaatggaactctccaacatttgctggggtgggaatgtgaaatggaaaaatccctctgcaaaacagtttggcagtgtcataaacatgacacacacacccccttcacatgccccacacactccacctcctgtgtgtttacccaagagaagtgaaatcatatcacaaagacttgctcacaaatgtttaaagatgcttttgccacacaagtcatgtgtccatcgacacatgggtcaattgtactatagaatttgatttacatgaaattccaggaaagacaaacctatttgagacacagaggagatcagtcgtttcctggggcagagtcaggaggggtggggattgatcatgaaaagtacacctgggaactcggagatgatggaaaatccagatcttgcttgtggtagtggttacatgggtgtatattttctcaaaactcatgaaaaggtaactttaaataggtaccttttacagcatgtaatcatacttcaataaagctgactttttaaaaacttcatttttaaaccccagacttggatgggttatttgcaattcccatactcagtggtacactaaagccagcatgccctggctcatgagagctgacatgcacccctctcttcccatctctgtgttaagtgacattgtcttggtagcttggatttagctgggttgggagcattcacacgtggacgttggcaaatgcaaccaattgggacttttgtttttgttttcgttacaaaaacaaaagccagttattgaacgttcactgacacactgcatgtatacaactcatattcagaatacataataaatttctgcaaatcaataagaaacacaagtagccatattttagaaagcaagcaaatgtcttgaacaggcacctcacaagaaaagatatccaaggttcaatgagtggctttactcatccgggatatgcacattagtgcaacagtgcaatattcctaaacactttccaaaataaacaaattttaaaagactgatcaacctcattttgtaaagatacagaataaatggaattataaaatcaactagtgaggatgtaaatttctttagaaagttgttggtatatgctaagccaacatatgcctatctatgaccaagcaattccacttttgggagcacaatgaagagaaattagtaaaaatatcagtgaaaaagtttacaagaatttttctaggagcactattaacagcagcccaaatctggaaacaatctaaatctctaacactgtgaaagagaatggacaaataacacgttgtagaatttaatgcaatggggcagcaaaaaaagagtgaagtactgatgcatgcagcaacatggtgcttctcacagacattgtgctgaacaaattgaaccataaaacaaaagagttccatagaacacgcaaagctaaccaatgaggagagaaggtagaacagcaactaatacttagggaggagggactaacaaagagatagcataagggatcatttaggactctggtaatgttccacatcttccccaaaatagtctaaggggaaatatttccacccagaaattatatccagctaagctatcaatcaaatggaagagcagaataaaggcatttttagtcatgctatggctcaaaaatatatcttccttgtacccattttcagaaagttactggaggatgtgctccaccaaaacaaggatataaatccagaaagaaaaagacaaggcatccaggaagtaatggatccaacatcagagagagatgaatgaaaatccaaagacaagagtgaagggagatcccaggaaacctgtgtaccaggctgagggagcagccaatagagactggtccacacataagacagctctgagagagatgtttccaaaaaataaatgaagctaatagattgttatatttgaacctcttgagtggagcatggggatgaatgagtcagagtttggggaggagcaattgttaactccaagaggggaaaaacataaacaaaaacaaaacatgtacagataaggaaatttaatctggttccactattcagacttggctatgaacaatatttactttattataatatacattctgaacactgatgtaaccaaatattgatattttacttcctttgccttctgaggatgggaagggggaacttttcacgggcctggtgataaactagagaaagtactttcctccacaataggaaatcagatcatacctgaaattgaaaatgcaagaaataacagagcatgtatattgtttaataattctgagacaaacaggagaactaagaagagcatctgggatgggccttgggagggatgcatgccagagagaggggggtgttaaaggcattcagttttataatgaaagcagagcataaaagtttgaaaaatttgtagcctgactatgcaatagaaaagaaaaacccattttctagggagaaattcaagccggatgcagaaatttgcataagtagcaaggagcctattgttaatccccaagaccatggggaaaatatctccaggccatgtcagagaccttcatggcagcccctcccatcagaggcctggaggcctgggaggaaaaagtggtttcgtgggtccagggtccccatgctgtatgcagcctgggtgaaaggagccaatgtacagctcagactgtggcttcagagggtggaagccccaagccttggcagcttccatgttgcgttgagcctgcaggtgcacagaagtcaagaattgaagtttgggaacctccgcctagatttcagaagatatatggaaacgcatggatgcccaggcagaagtttgctgcaggggtggggccctcatggagaacctctgctacggcagtgcagaagggaaatgtagggccagggcccccacacagagtccctactggggcactgcctagtggagctgtgataagagggccaccatcctccagaccccagaatggtagatctattgacaccttgcaccatgtgcctggaaaagctgctgacactcaacaccagcccatgaaagcagccaggagggaggctgtaccctgcaaagccacaggggtggagctgtccgagaccatgggaacccacctcttgcatcattatgacctggatgtgagacctggagtcaaacgagatcattttggagctttaaaatttgactcccctgctggattttggacttgcatgggccctgtaaaatccctttgttttggccaatttctgccatttggaatggctgtatttacccaatacctgtacccctattttatctaggaagaaactagcttgtttttgattttacaggctcataggtggaagagacttgtcttgtctcagatgaaactttggactgtggacttttgggttaatgctgaaatgagttaagactttgggggactgttgggaaggcatgactggttttgaaatgtgaagacataagatttggaagggccagggacagaatgatatggtttggctgtgtccttacccaaatctcgacttgaatttcatctcccagcattcctacatgttgtgggaggaacccagggggagataattgaatcatgggggccggtcttttcctgtgctattctagtggtagtgaataagtctcacaagatctgatgggtttatcaggggcttctgcttttgcttcttcctcattttctcttgctgtcaccatgtaagaagtgcctgtcagctcccaccaagattctgcggcctccccagccatgtggaactgtaagtccaattaaagccctttttcctctcagtcttgggtatgtctctatcagcagtgtgaaaatggactaatacaggggcatcgcaccatagtttgcagatggaacaggtaggggtggcagggtggggagccagggggcattcctagctgagacacccattgttcaatggagcagaactctgggacaggtggagaacatctgctggtaaaaaaacaccccacccctggtaccaaataccccaatagcaaagacatacaggcaaagacaggaggaaagtggggctgggttttccagacttgccaactcacgatctgttcaactcccagctccaccagcagacacgcagcatcactgtgtgtggttgcagggcacagacacctgcaagtggtcagcatcacccaaccacatgcagcagtcctgggaccacagtaacatcccacagcaagtaaactaattagggttgcctggaggcaaagtctcagccacaacaaggaaagggaaggcttgtgagactcctgtgaggaaaatacccagggagggtataaaacctcagcagccagggcacacaaacccacacacctcacaccagcactcacaccacccagtccagcacccaccatggctgacgcctgctgcaccaggacgtatgtgattgctgcatccaccatgtctgtctgctccagtgacgtgggccatgtcagccgagtctcctcccccagcacctgcactggctcctcctggcaggtggacaattgccaggaaagctgctgcgagccccgctcctgtgcctccagctgctgtacccctagctgctgtgccccagccccctgcctggccctggtctgtgccccagtgagctgtgagcccagcccctgccaatcaggctgcaccgactcctgcacaccttcatgctgccagcagtctagctgccagccggcttgctgcacctcctccccctgccaacaggcctgctgtgtgcctgtgtgctgcaagtccaactgctgcaagcccgtgtgctgcgtgtccatctgctctggagcttcctccccatgctgccagcagtctagctgccagtcagcttgctgcaccttctccccatgccaacaggcctgctgtgtgcccatctgctgcaagcccatctgctgtgtgcctgtctgctctggggcttcctctctgtgctgccagaagtctagctgccagccggcttgctgcaccacctcctgctgcagaccctcctcctccgtgtccctcctctgccgccctgtgtgccggcctgcctgctgtgtgcctgtcccctcctgttgtgtccctgcctcctcctgccagcccagctgctgccacccggcctcctgcctgtccttcctctgccgccccgcgtgctcccgcctggcctgctgaggcctctgctcaggccaggagtccagctgctgatgggcacgtcccccagggccagccggctccggtcctgtcctgggttaagtggctgcccctacctgggatggggtctccatgtctcccctgtgctgaggtgacctctccctccttactcccaggagcctccatcctcactgctccccagctcttgccttccagcaggtgcccacctgcctgctgggtcccctgtcctccctcccagcttctctgctctgggtcacttggcctcgacttgaacctctcagcacctcctcctactccccaataaactctccttggtcacctgattctcttttcctgttgttctcctgggaggacacacggttttgagctgacattggtctcctccagccatgaccgtttctaggagtgagttacttaacctagaagtcacaagggacagtggcctaactcctccagggggtcaccaggtgggactcacggtcactcccaggaaggctcagtcccggctcagcccctgtgaccgggtcttcctgagcctggtcattcgctgtagtgccctgggctgtggggctctccaggccccaggaccaacccacccactgtcccacctgggagagcccaccctacagagtcacctgccgggaagctggcctgggttccgggcactgcagcctccaggcctggtcaccctccctgtgtgccgcccgcccgagggttctgctcgcttagcagcaatgcgaggggagagggaggggctgctgcacctgcgcaggagacaagggactcgatgggaacaaaagcatcatggactgggtggagggacacacaggattcccccaggatcttgatggagacaaaagcatcatggggtgggtggagggatgggatggggggatgcttgctgccgactgggacattccccaaggcccgccgcccctgcccctgaaatgtgtgtccttcacgtcgtttaggtgcgcgacttatgattttcaaggcttgtccctaatctctcccaggccaggcctggccaggttcttcaaggccctgtggctctgccgccccgaccggggtcaggggtccacacggctccagctcaggcctctcctcctcccaccctgcccagcggcatagggactgcccctgctctgctgggcttgcccatcctgccgtaggtccctcacctgatgacgccatgagctcctgctctggtgtctgtcggggtgtctggtgtctgtctctggggacctcagctcccccatcttgctctgtccacagcatcaagccccccgcccactgctttgaccattcacgatctgtgacgccagcgtcactctccccctctacacccattcaagcacagcacacggtctgagctggggatggccgtccccactgacgtcaggcagccctaagttggcctgtgccgtgcactttgcatcaccagcatggggacagcgcccagagacacgaccagtagtcactgtggctggagggagcccggctccacaagaggcaccgtccccagggggctgtcagggtgggctcccttgcagacagggagtccaagaaacctctgccattcgtgagtgaccaatcccagggcccaggcgagggtggaacagagtccctggtctgcccttctctcctcccagttccaggctcggttcctggcagggccgtgtggccgggctccggaacgttcctactggcccctctcccctctgacggggcctgcctgggggtgttgggctggggggaccatcaccagcagacagatgaatgcatgacagacttctccaatgagacacgcagagcaagagttcaagaagactctgatgtgcttgactccataagcagacagtaacctctctatgccacaagacgacagcagaaaaccagtgaaaaaggaagccacggtgtgtgagaagacactcgaccgagaagatttcaatgagacaaaagcataaactcccaggaggaaataggcatggacaggctactcccacccagcggcccaaatggccttggaacatgagacatcggcacccctggaaggcaggcacctgccgacaggaaccccaggcacctcaccccacctgtcctggaagaaaaagctggacacacccatcgctcaccggacgtggcaggcaggagctccagctggctgtggaaatgggggattggcaccactgctttgggaagaggcggggccgtatcctaccatgtgagaggccctcctggactccgccatgggcagtgctgaaaaatctccggcgcatgtacgtaagcggcactgtttgttaccatgaaaaattagaaacaacctaaatatccatccacgagggaatggaggcgaatggagccagcgccgcaccacggggaggccctgcacgagggccgtgcgctcacccgacccgcacacacgcaggagcgcgagtgcccaggctgcggaagagagtccaggccgcacaggtgccaagcgaggcagcgctctctggcctggggacacgctgtagcagtttgtgtaaataagtggatgggatcccacctctcagcggattttccagagaaatagctgggggattaaagacatttttaccatggaattaatgacagcggggatctcaccacccagcttaaccagatgtcattaattccataaccaaaggttttttttttttttttaaatttattctgtttttttggaaccatttgaaattcagtgctgtagccacatggcggcacctcccccgggtctctctgcaggtgcctcctgggagtgagggctttctcccgcctgcccacagcgagtgcagctgaagatggccaacttctatatatatatagttatcaaaagaagcagaacatcatgcaacagtcgtatccaaatttcccaaaaagctccccaaattggaatcagataggtctgtgcactgccctggtgaccctgaggttctcgtctcatttaacccaggagcgtcctcccgggaccagaccctgagcattctggacactgctgggaggtcttcatcaaggaaaacacgcccatgagacaactacttcaggcggggccgccagggacgccaaagccactgtcaggaggtgcttgagcaacagggtgtccccacagtgccacatcccccagcggaggccacacagagaagaccaccccatcggcacagacagaggtcggcagcacctgggcagagtgcagcgtgtcggcgggcacctcccagcggggcttcctatgtgtcactgcacacatgcttaggctctcagcccgaggccacatctgttcgatgcaggcaaaggcagctgccccagatccctgccagggtcacctctgctctaacaacatgacagcagggaacaaaccccaggggaggtggacgctctcacggtgcccttttgtctctaaagcggggagagatcttacaattcttctttttctctgccaggatgttgccttgggggtgggcacctcccttctccaccccacaccaccttccacacaaccacagacacaaggctggggcactggcccaaatgtcacaggtgtgcagccacagggctcttacctttcacagcctgtcagcccccgaccctggttccccagtccctcaccatgctgcctggccctgcctcctcctcctccctgccaggtgccttccagagcttcacagcctccttctccacctcccacaactccagtccctcttctcagatcagtggggcaagcctggctttgtttacctggaacccgagaccctgccctggtcagcacccaattcgagagctctgctcagcagtgagaatgagacaccgtgacaatgcggctgcgcaccggacacctggctcagcgcaggcagcgcacggacagagtctgcggtgtgaccacaccaagcagccctaaggcagcacgtgcccgcacaagcctcagcctctgctccggtcacgcctgcccacttgggtgtattttttgtctgacttttgcttctggggccgaacaacccagcgaattcaacacagccccaaggctgggctaaaagttcctgggaggaacacgtgccacagcctagacacccaccaggaaaagcaaccaggaaaggagggtgcagtggggaaccctgctagaaaacacacatggggggtctctaaaaccccaagggccccaagcacctcactcactcacccactcactcacctcactcacccactcatgcctcccccagctcacctcctccacacccccagcatggccacgtccaccatgttcatctcctctagcagttgcactgactcctggcaggtggcagaggccccagctgtgctgggaggtgggacatggggggacacttgggctccagctgtcccagcgctcagggagttctactcagggacagcttgggcatcctggcctcctgtgcacgctcacagatgctcaggggcgccctctgctccagccccaggcttgccgctgggatgcagaacagagaacagacacacggcctctggaattccctgtgctgggctgggtgggcggagggccccaatggcagaggaagtccaggacagcgtggggacacatgcagaccagagggtgagagaaacacatggacacacaggtccagttgtagccagatgtggtttcaaacaggattgagcaacagattcctagaaatacaactgcaggcaagggatgctggcaaggtgtggccgtgaccaggttgcctgcaagaggccctgagtctttacttcttaagagctatacaatcacaatgctgggggcacacgttattctttctttgccaatttaataaagaaaaatatcttatggttttcttcagcaagctgcgcagtgttccaaagcgtgaacacgctgcacttgatgtctgcaacaccaggtggatggcactgaatgtctctctagttgttctttattacaaacgacacttctgtgtgtgtttccactatatacctttccacactcagatatgtgtttgcctaaattcctaaaagtggcacttctaagctggagtgttagcagatttcaaattcataaagatatttagaaataccctcaaaaagagtgtccaaactgtgcctgctaagaccgatgacagaggaaatggtggagcggggaactgtaagggcctgtccctccacagaacatcagaaactggcaaaacaaacagatatggttggactttttgtccccatccaaatctcatcttgaactgtcatccccaggtgttgagggagagacctggtgggaagtgattggatcatggagttggtttcccccatgctgttgtagtgatagtgagttctcaccagatctgacagttttataaagcagttttccctgctctcacttgcttctctctcctgccaccatgtgaagaaggtccttgcttccccattgccttccaccatgactgtaagtttcctgaggcctccccagccatgtgaaactgagtcaatcaaagttctttcctttattaattactcagtcttggatagtatctttatagcagtgtgaaaaaggactaatacacaaacaaacaaacactacctggtaaaatcaactttatccaaactctggaaaatggtcaaagctttgcagcaagcaagggaacacataatcaagtaaaagcaacagagcccaataggagaaccttgtggattttaacttccccttgccccatcccccatccccagctgggtgacagtcaggaaggcagcagccggagttcctggtgtggggtgctgctgccagggaagcagagtggaccttgtttgtaaggcagtgcagttgcctgtttcgaccgtctggtggctccctgaaggactaacacacagggcttgccttatttcaccaactcagactatctcaaggtagaggagcagctatatggagggtgtgtgttacaacgtttaaaggtaaatgaacaagtcactgacacctaagtcaaaaattttcagttgggaaaacactggacacccctaaaaagcctgggaggaaaagctaggagatgacatgctttgaggaataagggagttagaaggttccacatatttttagagtccagaaagcccccgtgcatgtctatgatggggcactggctcagaaaagagctgagaagctctcattgctcacctctggctgaacctcaggctctgagcaagcaggaagtgaaggtgcaagcaggaagtgaaggtgcaagcaggaagtgaaggggaaggcagagtcacaaactccccagccgagtgctgaaggcgtggaccaacatacagagcccagctacaaaccctgaagaaaaataagtttttgattccaggggtttaaggaactctctgtcaaattactatctcagcactaagctaatagaacagtgagcacacatggtgaagaaactatttttaaaaactgacagaaacaaacaaaaacaaccacaatccacaacaatcagcaacagcaaactgcgcagagggaggagagcctgatacccagaaatatccctttgtaattgtcactgtgcagttttcaccagaggcatgtgccatgcaaagcagcaagaaatataagctactcatgaggaggaaaagcaattaatggaaaatcttcctgaggaagcccagaattggacttattagacaaagcctttcaatcaactctcttaaacatgtttaaaaaactaaatacaatcacagacaatgaattaagataaaccaggagaatgatacctcaccaaatagagaatatcaataaagagataggaggaaatttaaaaagaaattaaatagaagttctggaattggaaagtacagtcactgaaataaataactcatgatatggtttcaacagcagattttagcagctataagaattagtgaacaagaagatagatccattgaagtattcttgtctgaggagtagatgagaaaatgaggagcagatgagagaatgaagaaaaataaacaaatctgaaaagacctgtgggacaccatcaagcataccaacacacttagcaggatttccagttggaggggagacagtgggagcagaaaaaatagttgaagaaataatggcccaaacttccagaattgaggaaacacatcaatctaactcagagggattcacataaaaacacagtataatcaaactctcaaaagtcaaaacaaagagagaatgtaaaaagcagtgggacggaagactaacagcggatttctcatcagaaaccatggaggccagaacgcgttgggatgacatatttaacatgctgggtttgggcacaggggtggggagcacccaacaaccaaaaagacgtcttcatctggcaaagtgatccttcaaaagtgaagaagtaacacattttgaggtaaataaaacctgagagctcgttgctgaaagatgtcccttacaagaaatgctatttcaggctgaaatacaaaggcagtcgatagtaagctaaagcaatatgaatgaagaaaggtcaacagcaaaggtagccatgttggtagtttgtatgtttataggagtttttccattacatcttggttatctaatttgttgggtacaaatattcatagtattcctttataattatttttattaacgtaaggtcagtagtgatgttcccattttcatttacgattttagttatttgaatctgtcttcctttaatcagtctagacagaggtttgtcaaatctgttgctcttctcaaagaaccaacttttttgttccttgattcgattgatttttaaaatttctattccatttatctgcactctagtctttattttctaccttctgctaaatttggattcactttgctctttttctagttccttaaggtgtaaagttaaattaatgatttgagatgtttctatttttttatgtaagcattcctagctatcaatttccctctatgtactgccttcattgcatctcgttaagttttgggttactgtgatttctttctcattcctttccaagagttttctatcttctctttgaattctcctttgaccaattggttgtttgaaagtgtgctattaggttacacatatttgtgaattccagcttttcttttgttactgatttctagtttccttccattgtaatcagagaagatactctgtatgattcaaatcaatttagattattgaggctagttttgtggcctaaggtaaaatctaatctgaagaatgtcccatgtgaacttgaggagagtgagttttctgctgtagttgggttgtgtgtttttgcacatatctgttagacccagtagatttatgtcatttttcaagtcctctatttccttattgaataaaaatttagttctgttattttatacttttttaaattagagagaatggcttattgaagtctcaaactcttactgtagaactggaactgtctatttctttcttcaaatctgtccatttttgtttcatatacattggtgatctgatgataaacatgtatatatttataattgatatatcttattgatggatggacattaatcactacataatgtcctgtgggcccagcccccgccgatcagtctgctccagcttctgtatgacagtggcttcctcatcaggctcctttcctggcctatggctggcccctccccagtagggccatcatgtccccaggtaacatccacgtggccccctgggcagcacatatcattcctcagttgctctcactagaagccaatacttcaggccccacttcctaaggtctggaaaattatggcagcctaataaaacaagctgataaatttaagactggtattatttctctcccagttgtttgagaatattcagcagggaaagtatttgggtctgtagttggctctgtaggaaagcttttgatgttagattcaagttatttaatcaatatgggatatttgtatttttgttccttttgtgtggattcggtgtcttgacaaatatagacagttgtgtctccaccaacgcaatcaatacatagactcctctcatcatcccatacatttccctcatggccatttgtagtcattccacatccccatcctagtccctggcagccactgacattttttttggtccctttacaattaccttttccaaaatgttatatgcatggaaccccatggtgcttagtattttgccatataacataagacttaaatagacccttccctaaagagcaggtacagatggcaaataaatacatgaaaacatgctccacatcatgagtcatcagggcaatacaaacttaaaccccaaaggactctctctgtatagctgtgttgactaaagtaacaacacatctgctgtgcaggactggcaagaatgtggggctttgctgatacgtttgagcttaaacctcccatctcattttggtttttgcttacgcaaggaatctactcccttttatctccttgctttactgcttttggatctagtgttttgagattttttatgcccccatcttcccctcactgtattagttccttgggctgccacatcaaatgtcaccaaaaaagtgacttataagagtggaaatttattatctcgcagttcttagggccaggcacctgaaatgaagatatccacagggccatgctttctcttagctccaagggagactctgtccttgctgcttctagtttctggtgctcccagcaaaccttggcgtcccttggcttatagctgcctcatgacaatctttgccttggctgtcatacgccgtcttccctttgtgtgtgtgtttgaacttccttctcctttctctgataaagacattagtcattggatttaaggttcactataacccggtatgacctcattttaactaatttcatctacaaagaccctatttctatgtaaggtcacattgtgagtgacatggtttggttgtatggccctgccaaatctcatgttgaaatgtgatctccactgttggaggtggggccttgggggagctatttgactcatgggagcggatctctcatgacttagtagtgctgtccttgtgatagtgagggagttctggcaagatctggttaagcgtgtagcacctcccatcccccactctctttctcttgctactcttttgccatgtgacatgcccactcccccttcaccttccaccatgagcaaagccccctgaggcctccccagaagctgagcagatgccagcgccatgtttcctgtacaacctgcagaaccatgagccaactaaactttcgtcttataaattacccagtctcaaatatttctttatagcaatgcgagaccagcttaacacagtgaggttctgggtggatatgacttttggggaggcaagattcaacccactacactcatctacttcctcctgagttgtatattctttcattactctagtggagattacaacatgaatctatgactttttaaagtctaatgtaaattagatcttatattatttcccagatagtatagtgtactaagactgctttaacttcatgtagccccctcctgaattttgtgatcttcttgccatgtatttcatttctataaatattttacaacttctaagacatcttatacagtaaatattcatttagatttccccatgttgtcctccttttgttacacttcatttccttttcgacttcttgcttccatctgtgatcattttcattctgcctaattatctttttattttctgtagtgcagatcctactggtgacacaacctctcagcatccagagaacatcattttcctgtcctcatttttgaggatcttcttcccaggtgtagaattctagcttggtgcttcttttctttcagacagtaaatatatcattccatcatcctctggctgccatcatttctactgagaagtcatctgtaaatgctattgttgcttctttaaaggtaatatttctttttttttcccttggctgtttttaaatttttctctgtctttggatttcagccccaatatgcacaggcatggtttcctttgtattcaccttgctaaacattcttaaatgctttttgcatctatgggttaatgtttttcatcactttaaacttcttgtctattaaaccttcaaatattttactacccttattttactcatctcctcctatgatttcaaccatttatattcataattatttacaacataagggcatgcttactactccactttcttcatttccctcttttctttcccatctctgtactcagggctgaatttcctcatctccctttcttcactaatcttctctttggttttgtctaatatgttgtctagctaatctacttagttcttaatttcagctattatgttcatttccagaatttctgtttgattccatttcataaatctagtttgacactgaaattctccatttgtcctctggttttttgagcaagctaatcagcattattttaaattccagtttgacaattctaatatctaaaggtcctgtgtatctgtttctcttgtttgctttttcctcttggtcctttggtcagttggtttgtcttctagtagccctagtaatttttgactgaatccaggacttcatgaaaatttccaagatgatttgagcctctgttgatgctgctgtctccagaagagatcacttttgtttctgggaggcacttaggctacaggcagatcatatgagttcaatacgagctgatttaaaggtgggcttcattcttctttccgttttttccttcatcctagggcgtaatccttcacttatattcactgtttccaactgacagtctgttgttgttgttgttttaccagaatccctcctccttgtcaggtcctgaactctatgtttttgtcttccaattgtatgagactactaaaagctgtgctcagcctcagcctcatggctgtagtctgtgaatcagtaaatgcctcaataagaaaatccagaagaaatattagactcacttctgtgcactttccctctaatagggattcactcactcaagtctcagctgtcttggtgactcctggtgccctcaaatagagattttgtttgttaaaccaggtttcctaacttttctcagctagatggccagtctgatgtcagccaattccccacacacaaaagcagaacttgacagagagttttatacagcataagaaaaaggtagcataatggaatcgttttcagaggtcaaaattactcttcgataatttctccaaaaacatttattatttcagcccatttttatgaaggatcttccctattccaggcattattttaggccctcagagactgagtggtgaacaagacaaccacacttcctgcccacatgaagcttacctttgaagaatgggagctgagcacagcaaagaaaatgagcatgaaaagttaggagacttggcacagaaatactgatgatgggccacgcacggtggcttacgcctgtagtcccagcaatttgggaggccaaggcaggaggatcacttgagcccaggagttcaagaccagctgggcaacatagcaagactctggtctctacaaaaaaaatttttttttacaaaaagaaatattgataatgggacttgaattatctatgattgaagcgtatcataaagctatggcctgaaagagcagaaccaaatccatagcccaaaatggaccagttcaaaacttttctatcctgtctgaaacccagtcctatccccagcgttcccacatgcaagtctgagtggacctcggggaaggccgcggggagcggcatggcctctctttccttgctccccttctccctgttttgggctctaatttcttcagtgatggggacgggggaaggaatgtgcagggccaccactgtggggctcactggccactgctgcaccttctctccggctgctccagtgatcctgtgcttctaccagctgcttctgcctcttcagtgaggacccactttagagacacccccagggacagtagctggaggactctctccctgggacaccacactttgcgtaagactgaagggccacccctgcctccacagcctccttcttacaacctgggcagcactggtggggtgtggcagctggccatagctggtcaacttctgtcttattttagaaaccctgtggggacaggtctgacccagaatgttagcattatttttagaatgagaggccgtttccagctttgccagattcacagcaacaaagacgttctactcaacatcgtgtaatacgtcttactttataatgaaatatgcgtatgtgtacttgaatttttaaataaaaatgtgaaatcacaatcaatattataattagctgctgggtagcaatgttcctggaaagtgatcagggccattttataaggcaagaagctcgggacttcatcatgccctgtggtgataacaattcatcatcaaagatcatgcagccgtgagagttgcctgtggctgacctgggggtgtgtgatggggcctgtgggcagggctggtgagaaaaagatgcttgcagtgcagggcacacggaggagatggctccagcagtggcgagggctggcggctgcctgctgcctagcacagctacttcacgggttcagaacccgaaaccacagcccacgatgctgccattgtgcctcagcaaggagtgggctgagcccacgatccctgccctggaacagagtcctgctgcctcccaagcaaaggacagggtgggcaatgaacagagggcaggaggcacagaggccatggggattagaaattggcgagtcctgtgtcctacagcaggggaaggaccatactagaggaggagtttgcaccacaggaaataattcctaagggccggcttcctgcagaggaagcccgtgtcctgaggctgctggggccagtggctggacgatgccccagcaaccaaagatggccccaggcacatcccacccacatcccacccaccagacgcccacagccgtccttgcctccagaacccagctgggatcaggcccaccccaactcctgcccctgaggttccacatgcaacagactatagcccaggtgtgacaggagatttgtgagctgggcaatgtcaccagcaaacaaacatccctaatcatggcagacgccgcctctcagcaacaaggaaggggaagctgtgggccctggaacaacaaggccaggaggggtataaaagcctgagagccccaagaacctcacacactcacaaactcactcactgacacactcacacactcacttacacctcccccagctcacctcctccccaccccagcatggccgcgtccaccatgtccatccgctccagcgcttactccgactcctggcaggtggacgactgcccagagagctgctgtgagcccccctgctgcgccaccagctgctgcgccccggccccctgcctgaccctggtctgcaccccagtgagccgtgtatccagcccctgctgccaggtgacctgtgagcccagcccctgccaatcaggctgcaccagctcctgcacgccctcgtgctgccagcagtctagctgccagccggcttactgcacctcctccccctgccagcaggcctgctgcgtgcccgtctgctgcaagcctgtgtgctgcgtgcccgtctgctgtggggcttcttcgtgctgccaacagtctagctaccagccagcttgctgtgcctcttcctcctgccagccggcctgctgtgtgcccgtctgctgcaaacctgtgtgctgtgcgcccacctgctctgaggattcctattcatgctgccaacagtctagctgccagccagcttgctgcacttcctccccctgccagcagtcctactgtgtgcctgtctgctgtaagcctgtctgctgcaaacccatctgctgtgtgcctgtctgctctggggcttcctctttgtgctgccagcagtctggctgccagccggcttgctgcaccacctcctgctgcagaccctcctcctctgtgtccctcctctgccgccctgtgtgcaggcccgcctgctgcgtgcccgtctcctcctgctgtgcccccacctcctcccgccagcccagctattgccgccaggcctcctgtgtgtcccttctctgccgccctgtgtgctcccgcccggcctgctacagcttctcctcaggccagaagtccagctgctgacggtcatgtcccccagggccagccgggctcaggccccacctccctgccagtccttggacctcccagcccacccagcctcagcacagctcaacacagaaggagcagccccagccacagccgcccagccccggggtctcagatgctcactggctcctccctgacctcccccccgggcaggcgagccctggcttctcctcacggtgcttcctggctgcagaccacaaccctccgctggtcgctggttggggacgggccctcctgacccgggtctcacccccagcagcgtcaccctctgcccctgagcaccaataaagcgtctgcggccccagctgactccgtgctgactctccgcacccagggcgggagggggcagagtggggcctggcctggctctggggggctgggccccgtggatctctttacttccccagctggggggcctcggggggctcttgtgtgacacctggaagctcctgtccacctcgtggcacgttctgctgtccggctcccctcccaggtcctgtggggcccaaaagccttgttcactggctgagtcccacagacaccacgtgactcaggctaatgccccactcactgtgggtagaagcagctccttcccatggcaagggttggggctgtcccggggggtggcaggccccagctgtgctgggaggtgggagacgggcggtggggggtgggtgtggagacttgggctccagctgtcccagcactcaggagttccactcggagagagcttggccatcctggcctcctgtggacactcacagacgctcagggatggcccctgctccagccctgggcttgccgctgggatgcagagcagagaacagacacgtggtctccagagctccctgtgctgggctgggtgggtggagggccggtgggaacaggaaggtctcagggcggcgatgacagaggagtcccaggacagtgtgggaatgtgtccagaccagacagcaggaaggaggcctcctgggggtagtttcttagctcctgccatgggagacaggcagatggccagagccacactgtcccctccagtcctcacccacaccccccacactggtgacccggggctgcgatgccgcccactcttctcgccttaggagagcatagtcgggtttgggggcctcggccataccctgtgggcacaaaggacccccacacctgagaggagctgcatgtgtcagctcaggctgctgtgacaaagtccacggactgggggctcgagccacatacatggggtccctcacagtcctggggctggaaattgaggcccaggtgtggcagggctggttcccgaagactctctcttgggcttgcagacacagtcttctccctgtgtccttacggggctgtccctctgtgtgtgtctctgccctcatctcctcttctcaagaggacaccagtcattggattagggcccatccataggaccttaacttaggacttcaacatgtgaattcgggggcatcacaagtcagcccatatcagggggctctggctttggcccttgaggcaggagtgagggtggcagtgaggccacctgtgcctcgaagatccccagtggggcctggctggggcagacgctccctgtccataaactgcagcgatggacatttggacagagacacgaccctcggggaaattctgctcacatggactccttcacctgctgaacaacgctgtccagaggcctcagacacccaccaaatggttcctgtttaggcatcctgttgtccccagtgcctggctcataaggggaactctcactggtcccaccgcaggaggcacggctcgcttccagaaggggaaggtggggatggagcgcaggccaggcagctgtgctggaagagacaggccacacagggatgggtgcagggaaagtgggggccacagggctgtcgcgggggtcaggagcatcttgcacaggcttcctgagtggtatggagagtgacctagggcttcaggggccgtggtacacacactcacagtgatagaaaccaactcaggatttaggaatgggagttcttggagaccttgatgaggggctttccagtcacattctgtgggcaggggcatcctgtggtgggcagagggggaacaagcactggggaagtgaaatgtgaaggtaaataatttcttctctaaagatctaacagaacaaggcaggagaggagcacagtagtgacggcttcctgaaggactaacacacagggcttgccttatttcgccaactcagattccctccagccagagaagcagctacacagaggcttggtcagaacatttaaaggcaaatgaaccagtcactgccacctggacaaaggatatcagttgagaaaacaatggacaccccaaaaaacctgggaggaagagctgagaaattagatgctttgggaaataagggcattggaagattccacatattcttgggagtctataaggcccccatgcatgcccatgatggggcacagaaaagacctgagaggctctcagtgctcacctctggctgaactgcaggctctgagcaagcaggaagtgaaggggagggcaggaagtgaaggggagggcaggaagtgaaggggaagtgaaggggaaggcaggaagtgaaggggaagtgaaggggaaggcagtcgcaaaccgcccaggtgagcactgagggtgtggaccaacacacagagtccagctataaagactgggaaaaaaacatcttttgactccaggtgtttaagaaactctgtctaattactatctgagcactaagcaaatggaatagtgacccccttcatgacaaagagtatagtcattactaaaatagtttaggaaagtcacttaaaaacaaaacaaaactactagccacacaaccagcaacagcaaaccacagggaagagggagaatgtgccatccagaattatcaaattataatattccaaatgtccagttttcaacaaaaattatgaggcatgcaaagaagcaagaatgtatggttcattcgcagtaaagaaagaaaaaaaagccaagtagtgaaaaatgtccttgaagaagcccaggattgaatttactcgacaaagtctttccattaactcttttaaatatactcaaagagctaaaggaaaccatgacaaaagaacaaagagaaactaagaaaacaacatctcaaccaagagagaatatcaataaagagagagattataaagaggaatcaaatagaaattctggagttgaaaagtataataactgatatgaaaatttcactagagaagtcccacagccgatttgaacagacagaaggaaaaattagagaacaggtagataggtcaagtgaaatactccagtctgaagggcataaaaacaaaaagaggccgagcgtgatggctcacacctgtaatcccagcactttgggaggctgaggcaggcagatcatttgaggttgggagtttgagaacggcctggggcaacatagtgaaaccctgtctctactaaaaataaaataaataaataaatagctgggcgtggtggctcatgcctgtaatctcagctactcgggagcctgaggcaggagaatcacttgaacctgggaagcggaggttgcagtgagccaagatcatgccactgcactccagcctgaatgacagagtgagactccatctcaaaacaaacaaaaacaaaagaattttaaaactgaacagagtttaactggcctgtaggacaacatcaaacataccaacagcacacttaacagcagtgtcagaagaagagcagagagagaatggagcactcaaaactatttgaagaaaaatgatagagacagaaagtaaaatggtggttgccaggtgcctggggggaggaggaggaatgtggagttagtgtttaatggggacagagtttcagttttccaagatgaaaagttttgaagacggatggtggcaatgaccgcactgcattatgaatgtatttaatatcactgaacggtacacttaaaatgggataaatttcacgtgtatttaactacaataattttttaaatatttgaagtaataatgaccaaaaacttcccaaatatgatgaaacacattgaatctacacattcaagaagctccatgagcttcaagtagaataaactcaaaaagatccacacagaaacacaaaattaaattattgaaagccaaagacaaaacaagaatcttgaaagcaggaagagagaagattaacagccaatttctcttcaaaaaccatgaagaacagaaggcaatgggatgatgtacttaaagtgctgaaagagaaaaaaactgtccaccaagaagtctgtgtccaatgaaatgattctttgaaactaaaggagaaattaggacacttctggataaataaatgctgagagagtttattgccagtaggcctgccctacaagaaatgacagctcaggatgaaatcaaagggcactagacaataacttgaagccatattaagaaataaagaactggctgggcacagtggctcacgcctgtaatcccagcactttgggaggctgaggcgggcagatcagaaggtcaagggtttgagaccagcctggccaacatagtgaaactccatctctgctaaaaatacacacacaaaaaaaaatagctgagtgtggtggtgggcacctgtaatcccagctagttgggaggctgaggcaaggagaatcacttgaacctgggaggcagaggttgcagtgagccaagatcgtgccactgctctccagcctgggtggcagtgcaagactccatctcaaaaagaaaaagaagaaaagaaataaagaacactaataaaggtatcagttttggtagtttgtatgttaataggaatttatccattacatctaggttatctacattatgaatgtatttaatatcactaaacatgcttaaatggaataaattttattgattttatgtgttagtgtacaattgttcatatattctcttatagtcttttttatctatataggtcagcagtaatgttcccactttcatttctgattttaataattagagccttctcttttttctcagtctagttaaaggtttgtaaattttattgttgctttcaaaaaactaattttaggcttcgttggttccattgtttttctattctcaatttctttatttgctccctgtattctacatataatctttattttcttccttcttctaggttttggtttagtttgctcttccttttcctggttccttaaggtgtgaagttagattactgaattgagatctttcttgttttttaatataagcatttatagctacaaatttccctccataaactgttttgccgtatcccataagttttggtttgttatattgtcactgtcatttatcccatagtattttctaacttctcttttgatttattcttcaatcaactggttgttataagtatgtgttgtttaattgccacatatttgtgaattttccagttttccttctgttattgatttctaattcccactgtggtcagagaagatacattatatgatttcaataattttaaatttattgagacttgttttttggactaacatatggtctaatctggagaactgagaagaatttgtattctgctgttgttgggttgaatgttttatacacggccatattagatctagcttgtttatagtgttcttcaagttctctatttcgttattgatctttgatctagttctatttaaaaattttttttaatcagtggaagtgacttattgaagtcttcaaacattattgttgaactggaattgcctatttctttcttctcttctttccatttatgcttgatatatcttgggggtctgatgtttgttaggtacatgaatgtttataactgatgttaggtacacaaatgctataaaatgatggcttatgcctgtaatcccaactactcaggaggttgagatgagaggattgtttaaggccaagagttcgagaccagcctgggtaacagagtaagaccctggtccctaaaaaaatatgttttttcattagccaaatatagtggtgtgcacctgtagtcccagctacctgggaaactgaggtgggaggatcacttaagtccaggagtttgaggctgcaatgagttatgattgtgccactgcactccagcctgggcaacaggctgagcaataccctgtctctgttttaatggtgctaggacaactggatatctacacacaaaatcataaagttgcactacatctcacaccaacaaattaactaaaaatggatcaaagccctacatatatgagataaagccataaaattcttagaaggaaacataagagtaaatatgtatgaccttattttgggcaatggttttttagatatgacaccagaagcataagcaacaaaaggaaaaaatagataaattggatgtcatcaaaattaaaaagttttgtgcatcaaaggacactatcaagagagtaaaacaacccacacaagggaagaacatgcttgtaaatcataattctgataaggatctaacacccagaatatataaagaactcttataattcaacaacaaaaagtcaacccaatttaaaaataggcaaagtcctttaatagacatttctccaaggaggatatgcaaatggatgatacacgcaggaaaagaagctcaatgttattggtcattagggaaacagaaatccacaccacaatgacatgctgttgatacttcatacccaccaagatggctataatttaacacacacatacaccaacaaatagaaggtagcagatgttgacaaggatgaagagaaactggaatgtttgtacattgctagtgagaatataaaatggtacagatgctgtgaaaaacagtctggcacgtcctcaaaatgtaaacatggaattccatacaactcatcagttcccactcctaggtatatacccaacagaattaaaaagaggtgttcaaacagaaacatgtacaagaatgtttatagggccgggcgcagtggctcatgcctgtaatcccagcactttgggaggccgaggcgggaggatcacttgaggtcaggagttcaagaccagcctggccaacatggtgaaaccccgtctctaccaaaaatataaaaaattagctgggtgtggtggtgcgcacctgtaatcccagctacttgggaggctgaggcaggagaatcacttgtacccgggaggtggaggttgcagtgagccgagatggggccactgcactccagcctgggtgacagagggagactctgtctcaaaaaaaaaaaaaaaaaaaaagaatgtttatagaagcactattcacactagccaaaagttgaaaagaacccaaaagtgcattagcagatgaatggataaatgaaatgtggcgtgtccctttgatggaatatgattcagccaagaaaaggaatggcgttctgaaacatacccaaacacaggtgtaccttgaaaacatgctgagtgaacaaagctagacacaaagaccacatattccatgactgcgtctatatgaaatgtgcagaacaggcaaatccatagagacaagcagaatagtattggttgccaggggctgggcatggctgcttaatagtaccggggttccttcgggagcgatgatagtattctggaactaggtagtggggatggttgcacaacattatgactgtactgtcactgaattgcacactttaaaatgggtaaaatggtacattttattttatggttgatcacaatttaaataaaattacacctgccaagggtttctaagaatgaagcccctcgctctgcaatgctggatattatcagcattttaaatcttgtttgctcttacaggtgggagacgtgtgtttaaacctgagaaactttagttattaatgagatcaactagctgttcatctcattcatgcttattggaaatttaaaatttttagtcttctattcatttcttttgtatcttatcctgttttagtggtaaggacttcaaatttttcacattaatcttccacctgtcatggagattacaagtactttctggcagttcatatcttcatttgtgtacccaatgattccttcagggctgtgatgggaacgtcgtggatgctgagctgagctgaggcatgtggaccggtctccagcacccaaccctgccgggtttccaggggacatacgttgtatgtgttctggtcaaggtttatgctttcgttcacatctgaccctctgacattccactgggcattttatacttgggtctgctggctgacgggcttcctttcccattgtatttccacactgtcatggcaggggtacaggtagggggtgctgggtgcagtgactttgtctctcatccagcccttcagtgagcgtggcctgggacagtcactctgatcctaggtggacaatgatgtcacctacagatactagaaattcacatcacatttcaacttcttggcatgtggcttcagccaaagtgcaaacatagagtaagaccaggcgtccgggcagtggggctgactgtggccccatctgacacttttctcatccagaccccaagtatcctccactctccacgcaaccctcactccacacctgcctctccaaggtagaggcccctccccaccctcagaccctgacctgcacccgcccctctcaggacacctgaccagggctccaggggatggcagtccagacccaaaggccagtccccaaaccttgtcctcctaatgagctgactgtccagaggccttgccagaacattccatctcctcagaggaggggaggtcctccctgtcctcctgcccttggcagacatcaggatctcagaagatcccagagcccgccaggaagcgctgtcttcaagcatcttttcccaacacaggcacctccgtcctggctctcccaatctcagccacgccagcccaccccgtgaggtccctgcagacagaggctgggcctcccccaggctgagggcccacgctgggcacagtcacgggacctgccaggtggaagtcaccaggtcagccccagagaggtcacaccttccctcctggtgttcccgggagacaggctcagccaggggcgccggtcctgcccaggaccagccaagtgttaggagcagagtgaggacaagtcatggcaaaggaagcagaaataatgagggtcctcccggctccaaacaccaacacggaaggggagggcattgctgagtctcctgctgggaaaacacaggccctgggcatataaaagccccagcagctgacaggctcacacacacactcactcacacactcactcactcacacacctcccccagctcaccgcctccccactccagcatggccgcctccaccatgtccatctgctccagcgcctgcactgactcttggcgggtagtcgactgcccagagagctgctgcgagccctgctgctgtgccccagcccccagcttgaccctggtctgcaccccagtgagctgtgtgtccagcccctgctgccagacggcctgtgagcccagcgcctgccaatcaggctacaccagctcctgcacaaccccatgctaccagcagtctagctgccagccggattgctgcacctcctccccctgccagcaggcctgctgtgtgcctgtctgctgtgtgcccgtctgctgcgtgcccgtctgtaacaagcctgtgtgcttcgtgcctacctgctccgagtcttccccttcatgctgccagcagtctagctgccagccaacttgctgcacctcctccccatgccagcaggcctgctgtgtgcctgtctgctctaagtccgtctgctatgtgcctgtgtgctctggggcttccacttcatgctgccagcagtctagctgccagcctgcttgctgcaccgcctcctgctgcagaccctcctcctccgtgtccctcctctgccaccctgtgtgcaagtccacctgctgcgtgcccgtcccctcctgcggtgcctctgcctcctcctgccagcccagctgctgccgcacggcctcctgtgtttccctcctctgccgccccgtgtgctcccgccctgcctgctacagcctctgctctggccagaagtccagctgctgacagccctggatgtgatccggagtcccttcccaccaggggctgacctcccagctgccccagcaagctctgccctctctggctttgacaccctcagaaggtggggcaggctctttgtcttggggaccaggatgctcccccagtccttcccagatgatggctgcctgtgggaccccagctactcccccagacccaagttctgcagaactaacccccagcaggcctggttccaccctgggcagcaccccctctagttctaataaagccgcctctgtctcacaccaacctctgtcctgtctgtggacccccgggggggcacagggtgaggtgggaagtgatgccacccctgactgcagggagagtcctgacccccagcaggcctggctccacccctctgtctctgtcgaccttccatcctgtctgtggacccccgaggggcatgggatgaggcaggaagcaatgccttctggtgctggcctctgtgaaccctgaaggccagtctccctcttagccccgtgggcccccaaccccagcacgtggccccccggcccatcttaggaaagctgcctctggaaccaaggccaggagtttcgggacaaagtggaccctggcagcactctgggcccctgagccacattcaccctccccagctccatggctgccccccaggcctggggtagaccacctggggcctggctccacccagcagcctcacccctcctgttacccctggggagaccagctatggaccacagtgctcatccctgcagccctcatctcctccacagtaagacattgggaccacgccctcccccaggactcgagcccagcagcccagtattcatggggttctggaatacccattgctcaggcatcgctggcgagagcacagatgggcagggaccatggcacccactaaccaagcctgcgggcccccctgccccatgcggcctcacctagacattcagggtcctggctcccttttggtcccgtggtcctggactctgaccccgaggaccctgtccccgcacccccagcctcccaggtctctcccaaatagccctcagctctgcctgccaccctccgtcccagatgccacgtcggggaagtggcacaagctgctgcactctttccgccaggtcgctgtgcgcatttgagagcgcacgtccggctccagcaaatgacccttgcgtgtcaatgacagaggccgccagccccagcaccaggacctcccggagtcccaccccacagagctccctgtggtcagcacagccgcctcgctcactcccctcgaggcagatcacccaggacaaccagcagcagccgtccccagggctggtggccaaactgacacagccttgtccacctccttggaagcaaagccaagtccccatgaaaggacaaatgggggcctccagggacagagatgtttgtccaaaaacctgccccggtttttggggcagctggcaggggccgagccttcatcctaggtctccggggccatcctcgggaggggctccccacacatgcatgtctgagccccacatcactgtgctcactgatggccacagggtcagaacagagagccaggaggagggcccggggctggctctctgacctcctccacatttgccattgtccccaccttccctgtccaaggcaccgacaggacccagcctgtctggccgtccccagggaggatacctcctggtggggggtctcagctctgactcctactctgggtcctcattcgatgtgtcttctgcctcatcagagcttcaacccccagtgaaagcaccttggaaaacagttcctcaaaatgtcactcactgtgtgaccctgtgaccctgtcagtccagttctaggcatctaccccggaggaatgaaacaaacgtccacacacagatttctgtgcccatgtacacagcaccactgacagtagccaagaagtggaaagagcccaaatgtccatcagaggatgaatggacaagcaaaacacagcctatccacacaagcaaaacacagcccatccccatgggaatattattcagccatgaaaagggatcaaatactgacacaggctacaacatgcatgagccttgaaagcatgatgctcagcgagtggccacatgtggtgggattctatttgtatgaaagactcagaacaggcaaatccgcagagaaaggaagtagatgagtgtgtgaccaaggctggtggaggggctcatgaggagtgactgcttatgggtgtggtttttggagtgggaatgttgtaaaattacatattggtgatggctgagaaacactgggaatatattaaaaaccagtggattgtgcacttacagtgggtgaacttcatggcttgtgaattttctcttggtcaatgtgttaaaaacaaatagtctcagccctccatttgggatggccactggccaatgcctccacctccccttcatccagataaaaatgaatggcgccagagcagtgatagaaaatggaggcatgccatccacagaccaggtcagtaaggattttctgggaaaggcaagacaaaaagatcaggttctattgactttaaatccaacagaaagaaaggcagaaggactctgaagacaaatgacttttcccggagaccctagcaaagggaccatacatgaggatgactgtgggcactcagtggtctttaactgatgggtcgagttctgaagaagagccattccatgcctgcaaccagcgggagaaccaggaagggtggggttggcccaggagactcccagcctaggtcccaatctggagaggaagaggccacgccccaggaagctctggatgccaagatgaactggagcccccatgtccaatcagcgatgaacaaggcccccctcatcagagccccagcatcagctctggatgcagaatatgtgtatctatgtgcagaaaacctttcagcaatgaatgccaaacaatctagaccctcacttaaaaatgtgaatgacaactaagggtcctcagacatgtgaggaaatcacagcatgacagagaagcaaagtctgaacaagcgatgatgcagatgtgaggaaacaaagaggctgtcactccatgaaacaagaacagggtgctaccaaaaaggaggaggaagaggaggaaggaaaacaccccaagttccaggagactgaaagcatgacactctcaacacagatgaaactcaatgatggtctgcataatagaccctgaaagcagaattgctgatacagtgaccccagttcaggcaaggattgacccaaacccaatgcagaaggacagagataaagccaagaagagcctgagatctgagtgggaagagcccaggagacccagggtctgtgatcctaaccgggatcgcagtggggagaaaatccaagaatggaagaaaatcatcagacccatatgagaataaaagttttttgaactaaaggaagatgggatcgaggggatgaacacagctgatgacagtgacgagggaggggtctggtgaaatgaatgaagtaaaagaaagagacaatagtgccaggttctagacagaggaaagacttcacaagaagatcaaagttatgcaaatatgagatgcattggtggcccagcctctaccaaggtggagggaagaaattccgcacctagactctgctgtggcaggcttcagcgggaaggctgttcttaaacaacagggatccggaaaatttaccacccacaatgctttctgaaatttttactcagcaatttccaacaagaagaaacacgaccccctcttttcaaacgtccacaaaaatccacagacacccatcaaggaaaatctaaagaaaataaaaataaagtctaataaaaataagcagacatgaaagatggaaaaagaagtatgctcacagattcagagattttcctgtttcagtataagaaaatagtatgggtatatttatcctaaaatttggaaatataaattaaatgtactgtgtcctaaaaaatataaattacctaccctgagtaacaagacaaaaattttaatacaatgatatccaggaaaatatggaaatggtattgaaaaagctcattcttcagaaggcagactcagatgtttcaaagatgtataccatcagccttcaatacaaagacttttctgtgatacttgaaatattccagagatcagaagaagccagaggtcctctggattcctctagtaagactggtgacatcctgatgccaaaaccaggaataacagcgagagagataggactgtagaccaacatcatttaaaaaaataatgtaagagattgtatgaacctacaataacagaaaactaagccactatgtatagccattatgggaaatagtacggaagttcctcaaaaaattaaaaatggggccgggcgcagtggctcatgcctgtaatcccagcactttgagaggccgaggcaggcagatcacgaggtcaggagatcgagaccatcctggctaacacggtgaaaccccgtctctactaaaaatacaaaaattggccaggtgtggtggcaggcgcctgtagtcccagctacctgggaggctgaggcaggagaatggcgtgaacctgggaggcagagcttgcagtgagccgagattgtgccactgcactccagcctgggcaacagagcgagactctatctcaaaaaaaaaaaattaaaaacttaaaaattaaaaatggaactaccatgtgatgagcaatcccacttctgtgtatttaaacaagacaaattaaagccagagctcagagatacctgcactgccatgctaactgcagcactattcacaacagcaaagatacggaagcaacataagtgatcatcaacagatgagtggataaagaaaatgcggtgcatatgcatgatggaatacgattcagccatagaaaggaaggagatcctgtcatctgtgacaacatggatgaacctgcacacactatgctaggtgaagtgacccaggcacagaaagacaaatactgcagacctcacttatttgtggaatctaaaaaagccaagttcaccaaagcagagagtagaatggggattcgagggccagggggtgcagggagtggggacatgttgatgacaggatacagcttcagctgtgcaggatgagtcagttctggaaacctcatgtgcagcatgaggacagttgactgtaacacagaacgcaacatagtaacaccgaaatctgctaagagtccatcttaaatgtctcatcacaaaataaaggtaactacatggggtgatggacatattaattagcttgaccgtggtaatcatcacacaatgtgtacatgtatcaagacgtcatgttgtataccttgaatttatataattcttgtttgtcaattatatctcaataaagctggggaaaaagggataatgagctattatcaagtaatgtatatcttagatcactcaagttacaaagggtatcattaactatactcataaaatagaagcagaaaagccactggaactctcagtagattaatacacacacattcacacacatacacacacacatacacaaacaaactcactccttccttaaaagcctgaggcaaaattcatgataaactaaagtaggaaaacactgcatgcacgagaccaaggctgtgcgacaaagcagcaaacatcggcttagtgcggagttgcgggaagcatttctgttaactttggaaacaagaccagagggctgctgtcatcgcgtctccagcattgtgctgggcagccagccacgacgaaagggagtcaaataaaacaaaagactacgttttggaaaagaagaatccaaatgtgtgtcacttgcagaagacctggccgtgggccaccctgccctccagactcacatcccctcccggcacctccctctcccagccagggccatttaatccctgccattcaactcactcagatccccagagtgtctgcttgatttaagaaatggtttgatcatttgattgtccacagaagctgccctgctggcccccagtggaaagttccatgatccaaaaagtcatgtctccagtgagtccagggctctacagttgcacctcatgttgtggctgacgtaaaaagactgtacgtgcactgtgtgtgtctgtagtacatccactaatacgatgtcaccctagacttcctggctttcctatcatctcctgaaagcatcaccaagtccttcagtcccagaaagcggattaagcacacagatctcacacacctgtactaataatcactgaaaggatatttaaagagttataaaaaatgaaatcaaaattatctaacaaaaacgggaggctcagcagggtccttcatatgtttgtagaaaagagaagcagacagaaacaggttagggagtaaattggagcaggaccctaatgcactggaataaaatagtcttttattcagaaaactgaatgaactgccaccaatgagcagactatctgatgtccaaggaaacaagaaaaaaacatttaaaaactcaaagtaacatcatcagagtgaatggataacatatttcattcatcacaagatgaaataaaaagtcataaaaagagagaccaggaaagatgaaattattattaaaaatggaaaaacacttcggagataagtctttatattgaaaggctcaataagttctaaccactgaaagtaaaataatgcattagcctagaaacaaaagcgtgacactttagaacaataaaaagaaacccaaatgctcccagagagttaaggaaagagagaaactaaaaaatgacaaatgaccagtatcagactgtcatcggcaacactggacatcacaaaaaaatggtgacatgtgttcatcattttgaggaaaagtaatttaaaaccagaattttatacccagctaaactatcattataaatgtgaggataaagttgacatattttcagacaagcaaggaatcttaaaatgtatgtcctaaaatcaccatatatgaaaaagtacttgatctttcaccaaggcaaaatgaaaattgaaataatccagagtgcagcttcaaataaaacaaagagcctctgagggtggcatggaagagctgaagagacaaaaataaagcttggatccaccagctactgaatctctgagcattctccttacaaggtgtgagggatcgaagggagggccacttagcttttttttttttttttgagacagagtcttgctctgtcacctaggctggggtgcaatggtgcaatctcagctcactgcaacctccacctcctgggttcaagaattctcctgcctcagcctaagtagctgggactacaggcacatgccaccatgcctggctaattttttgtatttttagtagagaccgggtttcaccatgctggccaggctggtctcaaactcctgacctcgtgatccacccacctcagccccccaaagtactgggattagaggcatgagtcaccacgctcagccagcttcctcttatcttatcgtctgtgccgtttttatttcatatgaagtgtacatttttctccatgtttatgttttaagatgctaaaagtaataaaatatatctaatcagtccagaaacaggataggtggaaacagaattgcttcctttggagaaacgttcatctctaaaacctcaactcaacaaaagcttgcttgaaatattttccggccggacgcggtggctcacgcctgtaatcccagcactttgggaggctgaggcgggtagatcatgaggtcaggagttcaagaccagcctggccaagatggtgaaaccccgtctctactaaaaatacaaaaattacagcgtgcctgtaatcccagctactcgggaggctgaggtgggagaatcgcttgaacccagggggcggaggttgcagtgagctgagatcgcgccactgcactccagcctgggtgacagagcaagactccctctcaaaaaaaaaaaaaaaaaaaaaaaaaaaaaaggaaatattttccaccacatttctgtggccaaaataaaaactgatgaagaaacagagccctgcgacatacataccagtttaataagggaaaaacaaagagataaaccagcatgaatgatgcatctccagccaccagctgtaaacaccaacaaggaagaaaagcttgtggagcctcctgttgggacaacacatgccagggagggatttaaaagccccacagccctgagcacctcactcactcactcacacacacactcacacactcacttacacctcccccagctcacctcctccccaccccagcatggccgcgtccaccatgtctgtctgctccagcgcttactccgactcctggcaggtggacgactgcccagagagctgctgtgagcccccctgcagcgcccccagctgctgcgccccggccccctccctgagcctggtctgcaccccagtgagctgtgtgtccagcccctgctgccaggcggcctgtgagcccagcgcctgccaatcaggctgcaccagctcctgcacgccgtcatgctgccagcagtctagctgccagccggcttgctgcacctcctccccctgccagcaggcctgctgtgtgcctgtctgctgcaagactgtctgctgcaagcctgtgtgctgtgtgcctgtctgctgtggggctgcttcttcgtgctgccggcagtctagctgccagccagcttgctgtgcctcttcctcctgccagccggcctgctgtgtgcccgtctgctgcaagcctgtgtgctgtgtgtccacctgctctgaggattcctcttcatgctgccagcagtctagctgccagccagcttgctgcacctcctcctcctaccagcaggcctgctgcgtgcctgtctgctgcaagactgtctactgcaagcccatctgctgtgtgcctgtctgctctagggcttcctcttcacgctgccagcagcctagctgccagccagcttgctgcaccacctcctgctgcagaccctcctcctctgtgtccctcctctgccaccccgtgtgcaggtccacctgctgtgtgcccgtctcctcctgctgtgcccccacctcctcctgccagtccagctgctgccgcccggcctcctgcgtgtccctcctctgccgccccgcaagctcccgcctggcctgctacagcctctgctcaggcaagaagtccagctgctgagtgctcaatccttgtctcctgctgactgtgtctttgctgccaagcaggattctccagtctcaggagcccctggagtcctcagaatccaccagctccatcagtagccacagagctgctgcctgaaggggattttgagcgcgtcacactttcctccccactgtctgggaagagacaacccacaaatccctcagcaggtggactgtggctttctggagcccccttctccaaatgtgttgcttatacccaatgtgacaaagaagaactgctctaatcaataaattcttgagtcaggaaatacgggctggtgtgcactttctgctcttcccctgagcccctctgcctactccaaatttggggtgtgggacccactgtcttgttaaaggcagacaggacagtgtctctcattccgagatcaaacacttggaagacagcaggctttgaaagcaaatgtgatcagctccacactcttcctgcagccaaagccctgcccacaggggatgagcctccaagctgagccagggaggggagcagagctgagtgggctcggcctctggtgagctttgggccacccgcccatgcctgtcccctgccagtccaagctaaagctgagtcgggaagaagcagaaatcccgttcagttgggacctgagagccccaggcaccgtgctggcctcgtggtgtgtgggccgtggaaaaggtgcccacacagagggctgccccgagagtttgagggccactctgtgtgctctgaagcactagcaatttcatgggccccaagaggggtcctggagttactcagacgtcactcatcctactcagggtttaaggcctgggtgaggagacacagagcaaaaagacaccttatcgatgaacccttaggacagtgggagaggatgaggctgtagtctcagtggaccactagcactggagagtgaagagggcactagtgagaccagtcaggtcagcacctcctcaggaggctgggagggcccagggaagaagcaacagaacaaaaaccccaagaggaccttgaaccagaaagtagctgaatttaaacccacgtggactcataaatctctcagtcttccagagtttattcaacccgtgtccgttacttgcttattcaaatattaagaaaaatacggccatccccataaataagtggacaaaggccttcatggacctttcatagcacaaacagttaaaaaaagagggggagatgtttccacctcaccactaaccaaaggaacaggggagcctaaggcacaggggagtcggcacagggcgcaccaacattgctgaggccaagccgctgtgcagccagcgggcagacgcacccagggccgcagcctccagggcaccagagactttcagcctcccgatggctcccgaggggaaaggcagggacagccatggccgagcacagcttgtgacacccgggcccctgtgctctctgtggcagctgacatgcaggtctgctggtggccgtgtgtccatgcaactgtccaagcccacgcggtcaagctgccgtgccagacgcagaggagaaactagggctgcagtggcggggtcccctcccttgtgaacgtgcgtgaaggtgctcacagcacagcgacagctccgagtgctctgcccctcccaggtcccggggtgcccctcctgtctgtgagggagatgcgggacccactgagtcaggggcagctgctgcctgcaaaggcatcccgtgaaaccacaggaaaccgcaaagctccctccaccgcctgctggacagagccggacggctcctggggaccgggggagggtgtctgtaaggcgaggacatggttggtgcatgctcgtcagggtgtgatcagagaccctccagcctgcagacaccctcgcccagttgtaagggtgagagcacagccccaggcgaggctgctggcctgggaggagggatgagcagcggtctgtggaggaggccttctaaggagtccccctgcacctcacatgctcatcaatacagggcatcctggtaacggaagtttctagatatgggcctctcagcaggaggggtacactggctggtgctcctcttagctgatttcttggttcccaaacggctcccccgctacccacgtgtgccaacagcccccttctactgaggacagcaccccctccaggcaaatcccactcatacccaggacgtgcccacaccccttctcccgtgtggcccacacgcatgccacagggaccaagctggctctgtcggggcagccctcggttttgggggccaagcttcccattcttggaattagtgcaggcatcccccatacaggcctccctccttctgcaatagcttcaatgcctggatgggagccaggccaccctcaggcccagcttcgggccttcctgtgtgtgcagtgggcttgggctgtgtcctgaagaggcccagccacgcggattctcagtggactcttccttcccaaggaaccacgatgaaagacgccacagcccactgacgcacagaggaacccaggctgctctcatggctttgcaccgacctctttcctgggctgaacagtgtccccttaaaaaaagacatgttggtccagacgtggcgcatgcctgtaatctcagcaccgtgggaggccgaggagggaggaccactcgagcccaggagttcgagagcagcccaggcaacacagtgagaccccatctccacagaaaatacaatacaatttagctgaacatggtggtgtgcacctctagtcccagctactttggtgggaagacggcttgagcctgggaggtcaaggctgcagtgagccgtgatcgcgccactgcactccagcctgggtgaccaggcaagaccctctccaaaaaaaaaaaagaaagaaaaggtatatgttggatgctgatccctcatactgtaaacatgaccttacgtggaaacaggacctttgcagatgtagtcaagttgaagtgaagtcattagtgggggaccctgagccaacaccacttctgtttttataaaaaggcaaaatttgcacacgaacgggcacctggagaacgccatgtgacgacggcggcagagactggggccacgtgacgacgggggcagagattggggccacgtgatgacggaggcagagattgggcaatgcccctgcaggccaaggacaccaaagaaggcaacaggcccagaaaacaggacagagtcatcccccagatggggacagactctccttcaccaccatggaaggaaccagccccactgacgccttcacctcggactgcagtcctccagaaccgtgagatgtgagcttctgccatgtcacatagctggcgtgggactctgtcacagcagcccccggatgtcaacacgccctccagctccagcccccagtgagggtggagagtccagggaaatggggctgggggctgggaaaggagttctgagggaagtgcctggggcctgtgacctcctacaggccaagggacaggccacagagatccccagaggtggacggagtcctctgaagaggggacaaccatggcttggctctgacacacccaagaagtctgaggccggaatctgcagatgctctgggggaggacagggtgacactccctgatggtcccccaggtccaggtggcgccccaccagggagggggcaccaggggtggactcaggctctgcagtagaacctggggagaggacaggtcttggcagaaggaagctgttggcaccagctagagtagagcctcttccaggctgggggagccacagggaaaaagctcccacaatggacaggccacgagcgggagagtgaggccgaagccctggcaagcagagagagtgacagcccagtcaccacaggtctccagagaggagacttgtctctcctccccttttcttctccttgcctcccccacacagccccagacagctcacggctgtggctggcaagaccacgcagtgtgtagaaacaccaggctgtgagacagagaagttggatgtgtgtcctgtggccacaaacttagtagcttcgaacaacacgaatggatcatctcatagcagtggaggtccgaagtctgctgtgggtctcacagggctaaaatcaaggcatgggcagggcgggttccttcgggaggctgcaggagagaatctttcctcatctctttcagcttctggaaatggctcgagcccttggttcagggctagcagcaggcatctcactcacacctgccatgaccttctcctctggccaaatgtcctcctccctccttctgataaggaccctgtggagacactgggcccacctggataatccagggtactctcccattagccacaccttatggtccacacatattaagttcccttaattagccacacgtgtgaagtccctgctgccacaaaaggtgacactcataggttctgagaaccaggatgtggacatcattggcgaccatactcagctggccacagaagttcacctctatggactaaggggaaaaaaatcaagcttttaaaaaatgaaagttagtttgcttcagaagtcttactgaggactatagaccgaggcctatatagcccaggagcagtttaggcctcagtaagacttctgaataaaactttcttttttttttttttttttttttgaaacggagtctcactgtgtcgcccaggctggagtgcagtggcgcgatctcggctcactgcaaggtccgcctcccgcgttcacacaattctcctgcctcagcctcccgaatagctgggagtacaggtgcctgccacctctcccggctaattttttgtatttttagtagagacggggtttcactgtgttagccaggatggtctcgatctcctgacctcgtgatccgcccgcctcggcctcccagagtgctgggatgacaggcgtgagccaccgcaccgggccccattctctaaaagtttaatttttttccttagatgaaaatcacagtgacccagataggactcagagtggactgctcagggacgtctggaacactgcggggacccagcaccccggtaccagcacaggccacttgagcccccacggctcctccatggttacaggtgactgagtgactctctcctgagtctctgacctcccacttggttgagagtcctgagttgtattcagttagttcattttacttcttgctgaaggggtacattcttctgtgagactttttatgtcttacgaagggggaattctcctcgttgaaagatactaggtaggaatggcttcatgtgtaacccatacagagtctatacttgcaagtatctttctagaagtaaggggttagctaaaggagattgaacactgaaatggccaaaactgggattctcaaacattaaggcgtgccaggttttctgggactccagttgactacatatcatggcccattcttgtacacatttttaaatagttaaattatatcaaggaaaagtcagaactcagaatcatcaacctgcaaatatagggttaaaatgtagagtcttctggcggggtgtggtggctcacacctgtaatcccagcactttgggaggccgaggcgggtggatcacaaggtcaggagatcaaaaccatcctggctaacacggtgaaaccccgtctctactaaaaatacaaaaaaaattaaccaagcgtggcggcgggcacctgtagtcccagatactcgggaggctgaggcagaagaatggcgtgaacttgggaggtggagcttgcagtgagctgagatcacgccgctgcactccagcctggtgacagagcgagactccatctcaaaaaaaaagaaagataaatgatgctagtccttgccttttcctgaacaagataacgtcttatagggcgagtgatgatgcctctgcggtccataaccagatgtgctcctgcccccaaacccggatgtgattctgctttgatgcagcttctgagccagtttcatgtgatctgcacgtgctgacctcccgccacctgcatatgaactgtgagctgaaacccggggcggagcctctgacagggctgcccccgggctggtgtgagctgaaacacggagccggaatctctgacagagctgcccccggctagaaacctcactcttctatagtcctcggtaaaacttctgagtaaagctcactttaattccttaaaagctttttttatcaacaccacaaacctctttcccatccagttggatgaaggagtagctatagatttaaatttagtttaaggttttaatttcttgacaagagtgggttgcacataccagctaataagcagatggcccgttttacctaaaatggatcaaactacaaaattagtgatttgtcctcaatctcacccagaagagagtaagaactgacctcatacatttaaggaacaaagtgggacgaaggaagcctgatgtgactggggttgggggttcccatcaggccaagctcaggagcacggcccactagcccgagagggtgctgttgagaggccgctcaccaggcctaacattcatctggtacctgccccttctctgcagggaaggagctttccagaatcctggggaaggtacctcctgaggaaggagtgtgggaaagacactgaggagaaggcatcacacagactcaggtgagcactcagcatctggtatttatgatatttgcaagagacctaacatcagacagtgcggagggccctgtggatggcccaggctgtgaacccaggagaaactgtgtagaaaggcgcatggcctcaccggctgggatctagtgacggtgccgcaaaggaggcaggcggtctagtcaggtgacgacagtttgctgtgggaggatgtggggactgcctggcaggagttcagagagcctgctggcttctgacctcgcacctacgagggtcataggaggccacctgctcagcagccagtgggggtgctccaggtgacaggtctatagaccagggtggggcagaagggctggcagcacccagaggttgggcagaaggaagccacacacaaaacaggcttgcagctcacaggcacacagcaggccacctggcaggggctgggcacacagcaggctggctggcagcaggtggataccccacacaggggccggcacagcagagccacacagggggctgagcagcagcaggaggtcccatagccctcgggtgggtagcaggtgctggggacacagcacggggagccagggcaggccattgggcagcccgaagagtggctggtgtggcacatgatggagtgtggacaggtggggggcgcagaggacagggctggtctggagcctgcttccttaggtggcctttatacccaggctaccggcatcctggcaacaagccccctggcatcttcctcgtgggtggtttttcctcctctgccctgtctggttgatctttctgtgtttttctgttgaggttactcagttcaggaaactctttcagctaggggtgccctatcattcagcagaccgtgtgtttcctggaaacagagcaggggtagctggtgaagggctgtcagtgaggccaggggcccacctcatggatgttcaaggtccccccgttgtaaatgccatctggagctcacacaagcacagtcacactcactacaccaggggccccgttttgactgagaagctcagtcatcatcagggtcttcccaagtaacgagagccaaactactgggctctatattgtggaataataatgatgattattgaggtaacagtaatgcacagaggtctagcactgtgccaggctgtgattatctcattcatctttgccagcattcggggtggccgataccccattttacagatgtgcaatttgtaagtcatagagggtttgcacaatgggtgcgtgtctgcaccactgcagaggtgcagggatctggactgcttagtttcactctgggatccatggtcgttaccactgtgccaaattatactagggcttgaaggttcaataagtgactcatcctgaagtcctgaaccagctcggacagagaagatggacgaaaacatcagccacgttggcgtctgcagagcatggctcaggcgtgtgaccacagtgggcttcctgacaccacacctcagaagtgcccacttcccacgagtagcactaatggccacaggacacctcctctgcagacggagcccaggaggacccatcacggagtcgggcatgagctattcatatctggttcctctccctcgctgtgggtctgatcagtctcacccctgcagaggcagcttgggggaaagtgaggagctggtgtgaaattccaggatgcccctgaacttgggaagcagcgggcaggagtgtggatgacacgctcctcctcacactccagctctgttctcttgatggattggccacagcgctttattctacggtggtgtcacacggtgggggatgagccatctctcagggcagagctactctgtccatcccaggcagctcccaggggcaccctctgctcctgtgtgggtccttctgtgcctgctggtggtggatatgggtgattcctgccaagaagccttcagacaagtcagacaccacattaatgaaatcccctccaaggctgaagaccaagtggggtctcagagctgtggacagaacttagaagtctatggacccagagccgatctgtggccatgtgggagtcaccttaaggcctagggacaagccgggcgaggccacaagttcacaggcaactcctttcactgctatagttcagaatcacacttaaaaaccaagagaattggggcagccacagtgattgtgagctagtcaccaagtaatccattttaaaagttggttgtcttacgagtcgattacagaagaacaaggatgcgtctttgatatttatctgctcctttaccttcccctgttcctcctactccttcctgcaggtcagggcccacctggcctcgtcctagtcaacctaaaggacatccgtgcacgtcacctgcagtgcacatctgcaggggaggatttctcccagcttttgctcttctgaacaggtttttacctcaacatgttttgaaggatttttttcataggtatagaattctgggttggcaaattttttttgagcattttaaagaagttgttccattgtcttctggcctccactgtttttgctgagaagtgagggattttctcatccttgcaagaaccttataccttgtatgagaagtgtcttttttttccactgtcttcaataattttttgattttcattactcttactatttgatgcttggatatggttttctttgtgttgatcctcctaaaggttctgagattcttgggtctgtaagttgttattttttaaatcatatttggtgccttgggccattatttttttgaaacttatttatggttcagtatcgctctcttctctttccaaggttcaaactactagtatgttagacagttcagtactgtctcatatgtcttttcatttttctagattctttctcctcttcttgagacaagataatttctactggtgtgtcttcaggttcactgattctttttccatctgactcctaaccccaaatcccagacccccccagcatgggattctgatgcttggttcttgggtcctcatgatctgaccagttcacctgcacccatggcccaacacccagagtacaggattcctgcctcccctggacataccagtttctgaagcagcatcctcactctctccatggccacattgtctcctcacagacgccccccagaccacccaccagcacccccattactatctcctgaacccattttccccagcactcagccctgtatggaattatttcatgcattcatttcttcctttactcatttattcattgcccactgctagaatgctcttgaggccaagacctcgttgctgctggtacacaatatatatttgttgcattaacaaataacttcttgtatagattactctatggcagggttggctaactttctgtaaagggcagacagcaaatattttagcctttgcatgttacagtctcttccataactattcagttgtgccactatagtgcaaaagaagccacagacaacacataaactaatgacatgctgtgatccaataagagttcatttgaaaaacaggcagtgggccaaatgtggctcacagacgatagtttgccaacctatgctttaaagttttactctacaaaattaaagctcaaaatacattattgcctcaacatcttccttgatagcatgaaacaaaagtgaaacaacgggattcggtactttgagtcgagccagtggtgctatgtgcacggtagtagcctgaaaaaaattgacaaaaaacctgcataacgtcaaaccagaacatcctgtttacagaagaaactaacctcaaggccgaagctatttatggtggagcatgacgcgggaaagtacacgcgggaaaataagatgttgggaaacacagtggaaacaaccacaaggaagacaacagttgtgtttttgtgttacccagatgacaggacccaggtataaagaccaccagagaagcagcttccagacatcaccatcctcctccccagtaccagcccagccacacgccaccatgtgccacaccagctgctccccagcctgccagccaacctgctgcatacacagcccctgccaggcatcctgctatgtgcccgtgagctgccagtcctccgtgtgcatgcccgtgagctgcacgcgcattgtgtgcgtggctccctcctgccagccctccgtgtgcgtgcccgtgagctgcaggcccatcatatatgtgactccctcttgccaatcttcggggtgctgccagcccccctgcaccactgccctctgcagacccatctcctgcagcaccccttcctgctgctgaccagctgctcctggtacacgggggtacacacctgtatccctccgtgaataagcatctggtggacccccagattgcacacatagggcagatgaaaagcatgcccaaggaaacctctgaactctggggtgagaacgtggaaaaatgattcagaccttccatgaccctgggaaccccctcaaggaagtcttggctgccagagtccttctctcactccagcaggaaactaaaacccatgtgagccaaataaatcggctgtccctatacacctcgtctctctcttttatcttcatgtatttcgtaagttctttccttgaaggtacataccaacttcaatggcagcagcacctcttcagagagccaccttcctgatggctgagctgaagtggagggtccttggttgggggagtggcctgaaggttctgtcccccgactccctccccaagccttgcactgtggggtaataagatgttgggaaacacagtggaaaccaccatgaggaagacaactcttgcgtttttatgttacccagatgcctgggacccgggtataaagaccaccagagaagaagcttccagatggagcgtgttgggggagggtagaagaaaacaatcctctacccagaaggatggacaagaaatagtcctgggccccagatcccatgcaatacctcaaaggattactgtggcaaagagggcaggaaactctttcaaacaacacccaccacaaatacagagcagagttcgtctaccccgggaggggtagcaggaagtcgaagaaagtctcattctccaagtcccacatgcaaagggcctgcctaagactgacactggaccaggacaacagagagccctcctttctccagctccagcctagcaggcacagctcaataagcaacgtcagcctgcctctggggaaaggcagaagtgtgtagagatctcctctgaacgtcaggcatgcaggggcgtgtgaaacttagggtggagcaaaagcgctgacctccccacccctcatcctaagcacaagcactgatgatacaccctaagcacaagcactgatacaccctaagcacaagcactgatacaccctaagcacaagcactgatacaccctaagcacaagcggttggtgcactgaaggtaaccacagtaacaacaaaacccaaaccacggtcagtgtctgaccagattgactcatccacctccccccacacactaatggcctgacaggaaaagagacgcacgcatttccagaaggaactgatgatgtctgatattcaataaaaaattataagatatgcaaaaaagcaaggaaaaaccaagccattgttgggagacaaagaaatcaataaaactggattcaaaagtgacccaggggctgggcacagttcacccctgtaaccccagcacattgggaggctgaggctggagagtcgtttgagcctggtggttcgaggctgcagtgagctgagattgcaccactgcactccagcctgggtaaaagagcaagacactatctctaaaaacagaaagtagaaagtaaaatcacacaggtgttagagctatcaggtataaactttacaataactataatgaatagattaaaagatcaagagtaaagcattaaaaacataaatgaacagatgggtaatttcagcagagaaatggaaactataagaaaggtcaagtggatatggtaaaaatcaaaatacggtatcacagatggcttccttcagtgggttcatcagtatacttgatacaaccaggtgtggaagctttgaatttgaaaacgtgtaaatgtaaattgaccaaattaaaacacaaagagaaagagaaagagaagggtggagggagacaagagcaaaacatcaaatcctcatttatggatgtaattggagtccctcaaagagaagaaagagagggcagggcagaagaaatatttaaagaggtaatagttgagaaatattctaaaaataatgaaatacataaagtcccatatccaaaaagttcggagaaccccaaattgggtaactatatccccaccacaaatgactagacatgtcacattaaatctgtgactgacaaaaaccaaaggtaaaaagggaaatcttgaaagcatcaatattttaaaagcagactacgagcataaggacaaaggtagagtttacatcagacttctaatcagaaatcacaggaccgaaagtacatctttaaaatactgaaagaaaatccgtcgaccctatgacactaaaagtgtctttcaaaaatgaaagaaaacactttttcagatgaacaaaaactgaaaagacttcattaacagcacacgtgcactataagaaattcttaaaaaatttctttgagccaaggaatatgatagcagagagacacttgaatccacacaaagaaaagaccacctcttggctgggtgccgtgattcatgtctgtaatcccagcactttgggaggccgaggtgggtggatcacctgaggtcaggagtttgaggccagcctggccaacatggtgaaaccccatccctactaaaaatacaaaaatcagccaggcatggtggtgggcccctgtaatcccagctactcaggaggctgaggcaggagaattgcttgaacccgggaggcagaggttgcagtgagccaagatcgcaccactgcactctgtcctgggaacaaaaagaaaagaaagaaaagaagagctctagaaattattttaaaagaagataaatataaataggccgggcgcggtggctcacgcctgtaatcccagcactttgggaggccgaggcaagcagatcgagaccatcctggctaacacggtgaaacccgtctctactaaaaatacaaaaaattagccgggtgtggtggcgggcgcctgtagtcccagctactcgggaggctgcggcaggagaatggcgtgaaccccagaggcggaggcggagcctgcagtgagccgagatcgcgccactgcactccaggctgggtgacacagagtgagactccgtctcaaaaaaaaaaaaaaaaaaaaaagcattataactaattgactgtccagagcaaaaatagtgacagtgcattgtggggtttttaacataagtaaaagtaaaacatggcaacaataacacgaggaatataaaagaggacatggaggtacactgccgtaaagtcctgccacttacagatgaagtggcgtcatattacccggaggtatcctttgttacagtaaaggtatgtattgtaactcttaggccaaataagtttgaaaggacgtattaggctattatcgccttgctataaggaaatacctgagactgggtaatttataaagaaaggaggtttaattggctcacagttctgcaagctgtacaggaagcataatactggcatctgctcagcttctggggaggcagaattgtgaggaaacttacaagcactgtggaaggtgaagggggagcaggcacatcacgtggccagagcaggagcaggagagaaagacggggctgggggaggggccacacgcctttaaacaaccaggtctcccaagaactcactcactgtcgcaaggacagcaccaaggggatgacgcttaaccattcatgagaaatccacccccgtgatccaatcacctcccaccaggccccacctccaacactggagattacaattcaacatgagatttgggcggggacacaaatccaaactatatcaagatgtatacaaaaagtagatataaaagggaataactaagaatactaaaccaaaaagtggcatagaaagagggcaaagataaaaaggaacagatggaacaaatagaatacaattagcaaagtgatattttgctaatattaaattaaatgcaaattaatttattaaattaaattaaatgcaaatcatctaaacaccaaaaccaaaaaacagagatttttaattggattaaataattcaggacccaactatattctatctaccagaagactcacattaaatataaaaaacatagataggttaaaagtaaacagatggaaaaatacaccacacaaacattaatcaagtaaaattggaatggctatattaatatcaaagtcaacttcacaaaagaaatattaccaaggataaaaaggaatattacataatgataaagcatcaattcaccatggacacgtaacaattctaaatgtgtaagcaccaaacagccaactttccaaacacatgcaacaaaaaaactgagaagggaaaggaaaaacagataaatcagatttgtcattggacttcagcttcaagagaacaagtagacagaaaatcaggaaggatacagaaggcctggacaacactgtcaatcaacttgacctaatggatattgacagaacactccacccaacaataacagatacacattcttttcaagcacatgaaacattcaccaaaaagactatattgtgccataaaataaacttcaacccatgtaaaaaagttgaactaatacaatgtatgttctctgaccacaaagaaattcaattagacattaacaccaaaaggatagcgagaaacaccctgcagaactgtaaagtaaccgacacacttctaaataacccatggttcaaagaagaatcacaagagaatttagaaaatattttgaattaaatacaaattaaaagacaacatgtcaaaatatatggaacatggctaaaatagtgtttagagggataaaattatatcattaagtgcttatattcacaaagaagaaagtcctgaaatcaattatctaagtttgcactttaaagaaaaaaagaaaattaaactcaaaattagcaaaagaaatgaaataattaaaaatctgaaaaaaaaaatgaagtagaaaatggaaaagaattcaatgaaagcaaaagctgcttctttgaaaagaacaatgaaatgaataagcatctagccagactgagcggtaaaattataataaaaagaaaaaaaaagacacaaaatagcaatattaggagtgaagaagagacatcattacaaatcttacaattattaaaaacatgatacaggaatgatgtaaacaacttcataccattaaatttgataacatacataaaactggcacatttttaaaagacaaaagtatgaaagcttattccagagaagtaggtagcctgaatagtatcatatctattaaagaagttgaattttcagttaaaatctttcaacaaataaaactaggggcaaatggcctccctggaaaattctaccaaacatttaaagaggaaatataaccaattctacatgaactcttccagaaaatagaaggaaaggaatcattcccgattaaattcatagagccagcataatcttgatatcaaatttgaacaaaagtattatagtacatagtatatagaaaactatatactattaataatatctcttatgaatatagatgcaaaattctcaaccaaatactagcaaattaaatccagaaatatgtaaaagagataaaaggtcgtgatcatgtgagatttatcccaagaatgcaaggttggttcagtgttaaaaaatcaacttataattcaccatatcaacagactaaagaggaagcaccatattattatctcaatagattcagaaaaggcttttgacaaaattcaacatccattcagaataaaaactgctagcaaactagaaattaaaaggaacttcttttaaagagcatctatgaaaaacctatagctaatatcatacttaatgatgaaagactatatgctttccccttaaaatcaacaacaaagcaagaacattcacttttgcctctgctatttattaccatactggacttcctaaacagtgaagtaaaaagcatgcagcctggaaagaaagaaataacacagtctctattaacatattacattattgtctacctagaaaatccccaaaattctacaataaagctacaagaactagtaagtgaatttaacaaggtcaaagaaaaaatgccaatatacaaaaatcgattttattttaatatactagcaatgaacaatcagaaattgaaacttaaaaatagtaccataatagcattaaacttataaaatacttagggataaattctgggggaaatatataaaatgtatacattgaaaactacaaaatattgatgagaagaatcagagaaaacctaaataaatagaccatgttatggattgctggatatgtcgactctccccaaattgatctatatagtttcaatacactcccaatcaaaatctcagcacaaattctgtagatattgataagcttattcaaatatctatatggaaagacaaagaaactagagtagcctaaacaacttcttaaaagaagaacaaaattggagaactcacactagctgatttcaagacctactataaagctgcatttatcagggcaggatggtgttggcaaaaagatacttagcatatgacccagctattccactcctagacatttacccaagagaaagaaacaaatacgtccatgcaaaaacctggacttgctaacaaatgccccatgtggagcactagcatcacagaacttgggctccaagtggccctgagggccacagctccagagggcgggggctgagccaggcctcatccatgcttctctgtgcacagggcaggtaggttctccagaagcattttttggttaccaaccctccctcctctcatgctctgatttccagtttgacctctaactcccagcctgggggaccagagtgcttacgtgtgtgcataagtgtgtgcacgttgtatagtgcacacattgggtgtgttcatggattcgaatgtgttcggctgcaagcatttatatgtctgggttgattggttccatttctcactcagttttatccaaagcctcccagtttaaactacacaataggtccctgaccaccttgcctaaaagatgatgaaaccagttttttaaccctaaactcaacacttgcctccaaggcaaataaaaatcttggaatcgaaggcagccagtagtgagaacgttcttcaggggacagttctgggctatgctatctggaatagcagactcctggggcaagagggctggcccatctactggggaacgtttaacctgagacagtcacagcagagccccccaggaggggaatacagcccagacaggggaaatgcagaagaatgctaccagcacaacgcagactgggaaaagcaagttccagattacattctgaataatttccttttcatatcaccagaaattactaaattagaaaacacccatttcaggaatacatagagatatgactcaactctattttttctagaaagtaacagaataaggagcacacaatcccaacagtggctgccccaagaagttcttggtaaattattgatgatgttctcatttctatgtcaggcagtgggttcatgcgggtttattatattaggatcctcagtaattgatcatcagtcaatcaataaaaaccaagcctttgtggaccagtgatgggagtgtgtgccgcagaactaatccagttctgtaaacttgagatcctccgcgacctgggaaacaggacgtccaccaaccacatcagaaaacccaattgtcaatgctctgaggctttggccatcagtgcagggcttgttggcctggagcaggagtggacagccagtggggaagcgagaccactctaccacaggcgggtaagtcacttctgtggccactgcacctgggccccaggagccctgggagagaccacatgggcatctgcagctgcgccctccacccgggacaccaccttctgatgagcactgggtgaagggatcactgaagagggtttagcagcaaattctatgtaatcagcagaatagatagcagggagtatggaaataaaaaagaaagaccagaaatgcagagctgcatggggaaagctggtttatttggctctcatggggtcagagaatgactctgggaccccagacttccctggggggatgggcaaggtcagcaagggctccagatcattctgtcacattctcaatccagaattcagagggttcaactgagcatgcttttcacctgcaccatgtgcagaagaccaactgaggactcatccagggagtgtacaggtgtggcctcatctgcactgggagcagcgggtctggagattcatgctcagcagcaggaagagatactgtaggagatgggtctgcagaggacgctggtgcaggagggctggcagcacccagaggactggcaggacggagccgcatacacgacaggcctgcagctcacaggcacgcacagggaggactggcaggagggggctgcacacacaatgggcctgcagctcacaggcacacacacagaagactggcagctcacgggcacgcacacagctgacttgaagctcatgggcacacacacagaagactggcagctcacgggcaggcacacggctggcttgaagctcacgggcacacacacggaggactggcagcccacaggcacacagcaggatgcctggcaggagctgggcacacaacaggctggctggcaggggctgggcgcgcagcaggctggctggcagcccgaggagcagctggtatgacacatggtggcgtgtggctggataaggtcgaggcagagggcagtgatgtctggggacggcctccctgggcagcctttatacctgggcccaggcatccccacagcacagaagcacacctgtcttccttgtttttcttcctcagtgctgtctcctggagcttaattttctgttgtaggtgtctctgggttttgtttggcccttagcttcatgactaattgcaccttcttcgaactcttggtatgcttggaaacctgccagagtgttttactggcttcatcaagattcttccttgttctttaaaattttacctgagttacttttgtgagattccaaaaactcagatctccagatttttttcctctctgtgtgatgatggtccttaaaccacagaagtttacactcctctcatggctcaggaaggctccacagtcaatgtgaggtagaacaggacgtgtctagctgatctgtgggtgtcctgagagcttagagctggatgagagctagcagatggaggaagaacatggaaatcacttgtccataggatgagtggggacaaagggtgtgggtcacagagaacttcttgtgagtggtgaccatggatctttgtcttgagaaatcctcctagttaagaaccaagatgagacaacaccactggccctcatgcatggagacacagctctaaggaaatcaagctggtccaagcatgttcccagggaagcatgtgaggccagtgaagggtcccatggacagccacagcaggatatgtgtgagctgaatatagaaggttccaagggccagaatgacttctgggtatgttcagcagaaagccatgtgcaccctgtactgcagggacagtagaatctctgagcctacagatgtcaacaccagatcacttggaacttggcatcatgataacagaatgaaggaaaaaaccacgtgatcatctcaattgatatagaaaaggcatttcacaaaattcaagattctttcatgatgacaacaatcaacaaactaagaatagaagaaaactacctcaacacaatacaagccatacatgaaagacccacagcaagcctcatacccactggtgaaaaactgaaggctttttctctaatattgggaacaaagccagcatagtactagaagttttactaagagcaactaggcaattgtttttaaaaggaagaaagaaagaaacaaaaagcatccaaattgaaaagcaagaagtaaagttagctgtgttcacagatgacatgatttttatatgtagaaaactctaaatattccacacacaaaaattttagaataaatgaattcagcaaagtagcaggatacaaaagcaaaacacaaaaatcagttctatttccataaactaacaagcataatctcaaaaggaaagtacaataacaattccatttacaatacattaaaaagaacaaaatactcaggagttaaccaaagaattaaaataattgtgtaacaaaaactacaaaacgttgaaagaaattaaaggcaacagaaataaatggaaacacatcccatgttcatgaattggaaattaatattgttaatatgtccatactaaccaaagcaatctacagattcaatgcaatccctgtcaaaatcccaaggacatttcttgcagaaatagaaaaacccatcctaaagtttatgtggagtctcaagggaccctaaatagccaaatcaatcttaagaaaagaatagagctggaggagtcacactttctgatttcaaaacttactacaaagctacactaatcaaaactgtggtactggcataaagaccaatatatagactaatggaatagcatagagagcccagaaataaactctcacaactacagtcaaataattttcggcaaggctgtcaagacctttcagtgagggaagaacagactttttaacaaatggcagtgggaaaacaggatatccacacacaaaagattatttttaacccttacctcacaccatatacaaaattaactcaagatcaaagatagagaatctcagtagggaaattgaaactattttttaaatgggaatgctagaactaaaatgtacaatagctgatattttaaaatccacatgatagacgtaaatatagaatgagattgaagaagagttcatgaacttgaagcacatcaatagaaattatccaaaatgaaggagaggaagaaaaagaattaagaaaaatgaaaagagcctgtgagacatcattaaacagcatcacatatatgtaatatcaaactcaggtggctcacgcctgtaatcccagcactttgggagggcaaggcggctggatcatgaggtcaagagatcgagaccatcctggctaacatggtgcaaccccgcctctactaaaaatacaaaaattagctgggtgtggtggcacgtgcctgtagtcccagctacttgggaggctgaggcaggagaatcacttgaacccgggaggtggagtttgcagtgaggtgagattgcaccactgcactccagcctgtgacagagcaggactccatctcaaaaaaaattaaataaaaaaataaagcactgggcattctcccctaaaacacaaagctacaaacacagagcctcctccacccctcagcatcaagggggcaagggtgaggggttggagggctgtactttcagttaaagagaggctagctgtgtgcctgcagtatggactaaggagcctggagcctggactgaggctgccaggctgaaaaccgagaccatgacatcaggttccagcacactccattgctactggcaacagccatcccagtattcccaccattctcctcctcggcttacggatcacccgcaggaggtggcgtgccttgttgggatgaacatccggatgccctttgccccagcagtcccacccccagaggtcctacccccagaacactaacaaacaaattgtggaataggtttgcaaatgtttatatcagcaccatctgtaatagcagactcttgggaacaacaggcctgcccatctactggggggcatttaacctgaagtagaaacagcagaaccccaggaaggaggcacgctgaatacagaatacacccacaagaaatgcagaggacccttagcaactctgtacagagtgggagacataagtctcagaagattactcagaataattcccttttaatatcattcaaaaccactaaattagaaaacacacatttcaggaatacaaagagatatgactcaactctattttttctagaaagtaacagaataaagggcacataatcccaacagtggctgccccaagaagttcatggtaaattattgatgatgttctagtttctgtgtcaggtagtgggttcatggttcataggtgggggggttgttataatcattaataattgatcaatcagtaaaaagtgggcaggctcaagagggctgactagaggcacctgacacttgcctcttccacaaagaacccaaaagagtgagaggtaacaacattttgaatgggacatctgagagagacactggaattcagcaaagaagcaactggaattcagcaaagaagcgacaggaaatatctgaggcacagaaggcaagggaagggaggcagctggcccagctagaatcagtcgggagcccacagagactccccagtccagggaaatggtaaatgagagattcccagctgtctacatttccaccatggattcagcatggacctgaaaccctagccatgggagagcctcttattcttcacatgccctgagacttacatagggatttgccaggatgccacataatggcattgctccagagaaagagcccacactgggtctcacacacccaccaggtcctgagcagctgtagcatggtgccattttgagagcccagcccctaaaagtctgcatcctgccctggggcccaacagatcttgtatctccacatcccttcagctctgccgaatcccacaacccccaccaacccaagagggctgcaggagtgcaataccagctggatgcatcaataaggcaggggttcatgaacttgcatgtaccctgagtacaggctttccccacccaccatcataaattaccccacactattcaccatagcctgtgtccatgcacactgtgtggcctggcactgcaccctcagtgcccaagcataccatctgggggcctggtggtcccccccaacccattctaccaatgccagccatctatgcactcctcccagggacctgaggatgtgcccacccagcatgccactaccaccagcgctcacttgcatgtgccacctgggagcttggggactggcttgcccagcctgtcacaaccaccacttatattaggaagtgctgtctgagagcccaaaggctgtcccaccattgctactaccatcatccatgtcaggcacactgcccagcggcccaaggacccatccatgcatccaacccactgctgccactgctagcacataagcaagctgtctggaggcccaagaatcagcctgcctggacatggtaacaccagtgccagcatatgctactcaggggcctaaggacaggcacatttggcccactgctgccaccactggggcctgagatttggccaacctggtgtttctgaccccagaaaagcctcaccacagcctccactgacaaccacagccaagctgctgaggaaatcacaaacactagtgatgctgttcacagccaaagaaatcatacagagactaaactactgcatgcacccagaatcatagctaaagtattccaaccagccaccgccatagacacatctgcaggaaaaagtcttctcataaaaaagccagtccccaaaattggaagaagtgattgttatgtcagatgtgcagatatcaatataaggactcaagaaacatgaaaaaacaaggaaatgtcacacctccaaagggacacaagaattgtgcaacagattcaaatgaaaaagaaatgtatgaattaccagaaaaataattcaaaataatgatattaaggatattctgtgagatataagataacatggataaactatacaaataaaccagaaaaacagttcaggatatgaatgagaaaatcaccaaagagacagatatcataaccaaagaatccaacagaaatcctggaaatgaataattcaatacatgaaataaaaaatccatttgagagcttcaacaatataccagatcaagcagaagaaaaaatttcagaagttgaagactggtcttttgaaacaactcagtcagacaaaaagaaaaaaagaagaataaacaaagcctatgtaacatatggaacactataaagtgagcaaatattctaatattggatgttccagaaaacaaagagaagcccaaaggcatagaaagcctatttagcaaaataggccaggcacagtggctcacgcctgtaatcccagcactttgggaggctaaggcgggcggatcacaaggtcaggagattgagaccatcctggctaacacggtgaaaccccgtctctactaaaaatacaaaaaattagccgggcgtggtggcaggtgcctgtagtcccagctactcgggaggctgagacaggaaaatggcgtgaacctgggaggcggagcttgcagtgagcagagatggcgccactgcactgcaggctgggcgatagagcaaaactccgtctcaaaacaaaaaaaaaagaaaacctatttagcaaaatgataggtgaaaatttccctagtctagcaagagatttaaacattcagatgcaggaagctcagagatcctgatatggtttggatttctatctctgcccaaatctcgtgttgaattgttatcctcaatgctggagaaggggctgagggggaggggattggatcatgggggcagatttcccccttgcagttctcctgatagtgagttctcacgagatctggttgtttaaatatgtgtagcacctcccccttttctctcttcctcctgctccagccatgtaggacattccagcttcccatttgccttttgcattaattataagtttcctgaggcttcccaacccacgctccttgtacagcctgcagaaccatgagccaattaatcctcttttctttataaattacccagtctcaggtagttctttatagcaatgcaagaacgtactaatacagatccccaaatagatacaattcaaaaagatcttttccatggcacattatagtcaaactgtcaaaagtcaaagacaaggagagaattctaaaaatagcaagaagaaagcaactagtcatatataaggaaacccccatcagactaacagtggatttctcagcagaaaccttacaggtcaggacagaatgggatgatatattcaaagtgctgaaagaaagaaactgacagacaaggatactatactcagcaaaattatcctccataaataaacagaaataaaatctttcatggacaatcaaaagctgagggtattcatcaccactggaccagccatacaggaaattcttaagagaatattacaattctaaatctatatgcacccaataccaaaagagtctgatatacaagcaaatattattagatctaaaggaagagacagactccaatacaataatagttgaggacttcaacaccccactctcaccattagacatatcatccagacagaaaatcaacaacaacaaaaaaattggatttatactgaactttaaagcaaatggacctaataggcatttaaagaacatttcatctaacagctgcagaatacacattcttctcataagcacatggaacattattcaggacagaccctatgtttggccacaaaacaagtctcaactaactttaaaaaatcaaaataatatcaagtatcttctcagaccacaataactaaaactagatattaataacaagaagagctttggaaactgtacaaatatgtggaaattgaacaacatgttcctaaatggctactgggttaatgaagacattaataaggaaatcaaaaaatttctcaaaaaaaaataaaaagggaaacacgacatatcaaaacctataggctacaaaaataacagtgctaagagggacgttagtagtaataaatgcctacatcaaaaaggtagatgtggtggtgcctatagtcccagctgctagggaggttgaggtgagatgatcacttgagcccaggagtttaaggccagtctgagcaacacagtaagactccatctcaaaaaaaaaaaaagtagaaagatttcaaataaacaatccaatgatgcacctcaaggaactagaaaggcaagaacaaaccaaatccaaaattagtagaaggaaagagacaataaagtatatagctaaacaaaatagactttaaaaaaatacaaagaagtaacaaaacaaaaagttggtcttttaaaaagataaaaaaaaatcaataaacagctagctaggctaaccaagcaaaaaagaaagaagaccccaatacacaaaatcagaaatgaaaaaggagacattacaactgataccatggaaatacaaaagatcatctggctgggcacggtgactcatgtctgtaatcctagcactttgggaggccaaggcaggtggatcacttgagcccaagagtttgagaccagcccgggcaacatggcaaacacccaactctataaaaaatacaaaaattagctagttatggtggcacatgcctgtagtctcagatgctgagaaggctgaggtgggaagatcacctgagcccaggaggtggaggctgtggtgagccatgaccacaccacgactgggtcattgcactccagcctgggtgacaaagggagactctgtctttaaagtgtgtgtgtgtgtgtgtgtgtgtgtgtgtgtgtgtgtgtgtgtgtgtgtgtgtataacattaccagagactatgctctaaaaactggtaaacctagaggaaatgataatttcctggacatacacaacctaccaagattgaattaaaaaaaaaaagaaaacctgaatagaccaataatgaataaccagattgaatcagtaataaaaagtctcccagcaaagaagagcccaggcctgaatggcttcactgccaaattataccaaacacatgaagaaccaacactaattctcctcaaattgttccaaaaaattgaagaggagggaactcttcttaactcactctatgaggccagaattaccttgataccgaaagcagacaaaaatacagtaaaaaaagaaaagtacagaccaatatccccaatgaacatagatgcaaaactcctcaacaaaatactagcaaactgaatccagcagcccatcgaaaagataatataccatgatcaagtggaaattatcatacagatgcaagggtgattcaacatacacaaatcaataaacatgatatatcacattaacagaatgaaggacagaaagtatatgagcatctcaatagatgcagaaaaagcatttgacaaaattcaatatccttcatgataaaaactctcaacaaaccatgtacagaagaaacatacctcaaaataataaaggccatgtatgacagacccacagctaacatcatattaaatggaaaaaagctgaaagcctttcttgtaagaactgaatgagacaaggatgcatttttttttttcagttttcatcttgtttattcagtttgctccgagggcaaaatcaacagtagtagagatcacaaacattattttgattggcctcacaagtctgatcagtaaaatccgaaaaacagaaaatgttacacgagttgcaaagaaagcactcctggagttcactgacatgatagcaagtggaaagaatataaatgcaacaggtgttaacatttagaacagtacttgtaagcctgctcatgtctagacaattctgggacccttgcggcaaacccttcatgtatcactgctgatttccttgacatgaaatacgactttacgaaaatcttcctagaccttactctggctgtacttgagtggttcttgtgcctacggcgctggcatatgctgtcaggatttccattatctgtttcgtttctagggttattcgggcttccttcagccagtcttgtgccacttatctggattctcccttcagctgattgacaaattttgctactagctccagatcaccatgctcaatgcaataggaggcatatgacagtaatttaaacgtgtttatatcttcagatcagagctctgcagcttcagttgctgaggcgggaatagaagcagggactgcaggtaggagaagaagtactggtacaagctatttctggtttaatcaatcattgctacccttcgggccagtttttgaacagcataaaagcggactctaagggtctcttcactgtacaccccatgggtcagggactctggagggatagctgtggctaaagctttagtaaattcattatcagaacagttggctttgatggcctcaactgcactacccagtgggacagcaggcatttctgcagatgaggtcttcatgctgtactttaatgcctccactgaaagccagagttggtaggcttttctggcttcctcttcagcaactgcatgactctgaacagcgtgttcgattcctctgagtctggcataggcggtatttatatccagagtaaagttgtgaacttgctcttgacttagatgatgaaactgtaattcttgttccgagagtttctcagacaggttctgctcaaattcatacttcaattcctgttcttgaaccctaaggacatctcacaagtgatcagtgtgggcagctgcctgtcagtgaagctaggttctcatttcattctccatggcatctctgacttcctctacgtttctgtcctattcagcctgcattttacttccatgatgttctaatgcttttgctactacagagtcaaatgcccacttttcttccagcgtttgtttctccaaggctaatgtgatgtgctgcttttctgtggccttctgttctgctagctctctgttcagctgatcgatgtgacgatgtgcacgggcaatcagggagttcagatcatcagtagagagcttgtcagctgggtccgaaacgctcattcctttccacccaggaaggacttctggagtaatactgtccagctgtcgtttaaagtcatcctgagcttggcccaccagctcatgatactgagatacaagcttagactcaaattgagctgcttggacctttttgaccacattatccagatcaactatcatgttgtgaagtttatatgaggcttggccccagcaacctcttctttctttgcattttcagtcacacttttcatcttctctacctcttctttggctttgagaagggcattggcagcttcatctactgcctttctgtgttccttcaacgcaccttgcactgtgtggcacttagcagacttcttcttgccctcaatctcagaattgtccatggcggctttcaatatgttggagtgtgcattgacagcctggaccacagtgttctgagctgcaatcgcctgcagagtgacatttgcagtttgcctcagagcatcttcaaagctcttggctagagactcagttttaacttgttcttgtttttcctcttgtgcaaggcaagctgcaatttcttcacatggtcgttcccttatagaagatgaggatgcttcttctgaaagtgcaggtgtgggttttccttcatcaattgcagggtgatcagtttttaaagattcctcatgctgaaccccagggaccaacactgtatcacctgcggttgctgaagctggagtatctcccttttgtttttggagttgtgaggcaggctgtttaaattcttttgttacttctgatacactagagatttttagtggaccagactgagttgatttctttggcaatggaacattataaggtgcagaaccaagaaccacctcgaagagtttgtctgagtaaggtatggttttctctactctttctcggaaatgggaagcccatttggcatataggatagtgccaccaatacctccaccaaaaaacaaaaggccagctccagcaatgttgccagtagtcaaccacagagctgcctgaagtagagtatcggcggcatggtcacagtggacggaggactaacttcccatagagacaactctgggccacagcggtcacactcgataactgacaggcccgcagtatctgtcgagcggacggtgctgctggtggatgcgggagctgccatggcggcacgagtaagtggaggcatgtgtacatatgtcaaggatgcctatttttatcactcctattgatatggtttggatctgtgtccccacccaaacttgaaatgtaatccccagcgctggaggtggagcctggtaggaggtgatttgatcatgagggccatttctcatgaatggtttaacaccatccctcttggtggtattgtcatgataatcagttcttgtgagatctggttgtttaaaagtgtgtggcatcctcaccccacccacactgctccagaatgtgaagcactggtgccccttttgccttctgccatgactgtaagcttcctgaggcctccctagaagcagaagcctctatggttcctgtatagcctgcagaaccataagccaattaaacctcttttctttataaattacccagtctcaggtatctttatagcaatgtaagaatggactaatacacctattcaacatagtactggaagtccaatccagtgtaatcaggtaagagatagaaataaaagctgtcccaattggaagagaggaagtcaaattgtccctctttgcacatgacatgattttatatttagaaaaatctaaagactccaccaaaaaactattagaactgataaacaaatttagtaaagttgcaggatacaaaatcaacatataaaaatcagtagtgtttcgatacaccaataacaaactagctgaaaaagtaagcaaaaaggcaatccatgaaggctaaaacaactccatcttggatgctaatctgccatatggacttctagttaacctgttctgggaaggcctctaaaatttccagtttatctactgttccttgtataagagcacatactataaatcctgcttcaaaacaaccttgacgttatcctacttcaattggtctacagagcccttctaaatcacatataccctttccttatggtatataagccttgggtctggaggggtaatggcacagggatccaccagcttatcttaccaccacccaagacacagacatggcttctgttttaagtccttattaaatgtttctttctgagaaactggatttgtcagcctctttctgtggcctctcagcttccttgaactttgggggtaggtttgcatagacctgcccatggaacacaatctcattcacaatagctattttaaaaataaaatacctggcaataaatataaccaaggatgtgaaagacctctgcaaagaaaactacaaaacactgataaaataaattgaagaagacacaaacaaatggaaagacattccatgttcatggatcagaagaaatgatattgttagaaagatcatactatccaaagcaatcaacagactcaatgcaatctctatcaaaatgccaatgacatgtttcacagaagtagaaaaaacagtcctaaaattcatatggaaccaaaaaggaccctgaatagccaaagttatcctgaacaaaaagaacaaacctgtaggtatcacaccgcttgacttcaaaatatattacaaggctaaacagcatagtattggtataaaaccagacacatagatcaatggaacagaatagagaacccagaaataaatccatatatttacagccaattgattttcaacaaaggtgccaagaacatacaatagagaaaggacaccccttcaataaatggtgctgggaaaactggatagccacatgcagaagaatgaaactggatccctacctctcatcatatacagaaatcaactcaagatgtatcaaagccttaaacataagaccgaaaaccataaagctactagaagaaaacataaatgaaatgctccaggacattggtctaggcaaacagtttatggctaagactacaaaaacacaggcaacaaaaaccaaaatagacaaatgagattatattaaactgaaaagctctgcacagcaaacggaacaatcaacagagtgaagagacaacctgtgtaatgggagaaaatatttgtaaactatgcatctgacaagtgactaatatccagaatatgtaaggaactcaaacaactcaacaacaacaacaaaacaaataattccattaataaatgggcaaagcacctgaataggcatctctcaaaagaagacatacaaatggccaacaggtatattaaaaaaaactcaacatcactaatcatcagggaacttcagatcaaaactacaatgagatagcatcatcttaccccaattagaatggctattatcaaaaagacaaaaaataacagatgctggtaaagatgtggagaaaagggaactcttatacatcatttgtggaagtgtaaattagtacagccattatcaaaaacggtatacagatttctcagaaaactaaaataaaactaccatactatccagcaatcctgctactatttattcaaaggatagggaattggtgtatcaaaaagatacctgcacccccatgtttattgcagcactattcacaatagccaagatacagattcaacctaaatgtctatcaataaataaatgaatcaagaaactgtggtatatatttacaatggaatcttattcggccataaaaaagaatgaagtcctgccatttgcagcaacatggatggaaccgaaggtcattaaagacaaatattacatgttctcactcacatgtgggagttcacaaagttgatctcatggaagtagagagtagaatgatattaccagaggtgaagaacggtgtgtgttagaggagaagtgagtttggttaatgggtacaaacatagttacacagaaagaataagttctaatatttgatagcagcatagggtgactacagttaacaatgtattgtatgtctcaaatcagctagaagagagagtgtaaaatgtcctcaacacagagaaatgatagacaaggtgatgaatatcctgatttcatcattacgtatcctctgtgtgtaaagtatttcatatgccccataaatatgtaaacatattatgtatcaatttttaaaaagtgccatatgtagatcagtgatgggagtgtgtgctgcagaactaatccagttctgtaaacctgagatcctccgcgacccgggaagcaggacatccaccaaccacatgggaaagcccgatcctcagtgctctgaggctttggccatcaatgcagggcttgctggcctggagcaggagtggacagccagtggggaagcgaggccactccaccacaggcgggtaagtcaccgctgtggccactgcagctgggccccaggagccctgggagagaccacatgggcatctgcagccgcgccctccacccgggacaccaccttctgatgagcactgggtgaagggatcactgaagagggtttagcagcaaattctatgtaatcagcagaatagatagcggggagtatagaaataaaaaagagagacaagaaacgcagagttgcatggggaaagctggtttatttgactctcatggggtcagagaatgactctgggaccccagacttccctggggggataggcaagttcagccagggctccagatcattctattatattctcgatccagaattcagagggttcactgagcatgcttttcacctgcaccatgtgcagaagaccaactgaggactcatccagggagtgtacaggtgtggcctcatctgcactgggagcagcgggtctggagattcatgctcagcagcaggaaggggtgctgcaggagatgggtctgcagaggacgctggtgcaggaaggctggcagcacccagaggactggcaggagggagccgcatacacgacgggcctgcagctcacgggcacgcacacagaggactggcatctcacgggcacacacacggctggcttgaagctcacgggcacgcacacggaggactggcagcccacggggatgtaacaggatgcctggcaggggctgggcgcgcagcaggctggctggcagcccgaggagcagctggtgtggcacatggtggcgtgtggctggataaggtcgaggcagagggcagtgatgtctggggatggcctccctgggtagcctttatacctggacccaggcatccccacagcacagaagcacacacctgttgtcttccttgtttttcttcctcaaggctgtttcctggaactcagttttctgtcgtagatgatgttttttatctggccctttgtttcgtgactaattgcaccctcttcaagctcttgttacatttggaaacctgcccaaatttatcagtgatgcacaggcagttttagctccacctgcctgatatctgcctcccttcgttagttctacgctgaagcagacatgagtggtacccaaaagagctcctcgaaccgcaacttctgttgcatcaaccagaaactttggggaagagaccagaactgaatatagacaatgaaatcatactggggaacctgctggagtgagtgatgcaaagctggctactctatcaactatacagttgagatttaggagatgctcgttttcaggcagccgtcaaccagcagtgcagactgtgcttcctgagagagaagaaacttaggagataaactcccatttcccagctctctgctggggcaggcttccaaaatgcagtgtcaccttccaaaatgcagtgtcaccagccggagtcagagcagaatacagtgacccaactctgccgaggaggaaggggccagcgctcaagcagctgaagccctggagtccgaggagcagagaagcggaaagaaggatccgtgtggagagcaggccccacactgtggaagctgactgtgaatctgtggaacggggcagggctgtgcattcccagggcaaggcaaccacaggctcaccagagagaagctgctagaggattgagagtgaagcccccctccagtccccacgtcgacatccagccgagaccccctacagcccggcaccaaatgagtaaggaccacagactacagtgagacccgcctaggccagcccgaacaaagcctaaaccaattcagaataggatttttagggaagacagtttggaatgtgagtcccaccaagatacagagtgttccaagttgtagatgcttcccagagatccaccctagcaaagtgttgaacaaaaactgcacaagattaaggtcattctccagtaactgacggctagaacaaaaatcagaaacatgatacagctcagagtctgtaaatgcattattatgatacctcatacacaatcaaaatcatcagatattgaccaggcacggttgtttatgcctgtaatcccagcactttgggagaccaagatgggaagattgcttgaggctaggagtttcagaccagcctgggcaacatagtgagactctgtctctacaaaaaaatggttaaaaattagccagacatggtggtgcatgcttgtggtcccagctacacggtaggttgaggcaggagggtctattgagcctgggaggttgaggatgccatgagttatgatcacaccactgcattccagccagggcaacagagcaagaccccgtctcaaaaaacaaatcatcagatattaaaagatataggtaaatttaattcactgttaaaaaaaataaacctgatatggtctagatattggacatggcaaatgatgactgtaagcagctattatagacatcttccaaaaaatccaagaaaactgttcaaataattaaaggaaaacattgtcttcatgaatggataaatagggaatctcagtagagtaattgaagctattttttaaaatgggaatcctagaactgaaaagtacagtagttagaaattttaaatacaccaaatttgacttcaaaaatcaacaacgtccaaatccaggaatctcagaaagcccccagtaggataaataggaagaaaaccacatccaggcacatcatgaagtgatgaaaaccaaaaatgaagacaaaatctcaaaagcagtgacaggaagacactttacatacaaaggaacaaggataagaaaaacgccctggcttctcatgagaaacagtggagacacatctttaaaatgctgagcaacaataactggcaatccggaagtctacatctatgaagaacgtgcttaaagactgagactgaggccgggccgggcactgtggttcacacctctaatcccagcactttgaaggctgaggcaagaggatcacttgagcccaagagttgtagaccagcctaggcaacaagcaagagcacatctctacagaaaatttaaaaattagctaggggtggcggtgtgcacctgtagtcccaactattcaggaggatgaggcaggaggatagcttgagcccaggagttcgaagctgcagtgagctatgactgcaccatcacacttcagcctgggtgaccaagcaagaagggtctcaaaaaaccccagaaactgagattgaagtgaaaatctgttcagaggaacaaaagctgggagaaatcctcccctgcagatgtgcgctgcaggcaacgtggacagatgtgctttaggttgactaggacgaggccaggtgggccctgacctgcaggaaggagtaagggccaggcaacgtgcacggatgtgctttaggttgactaggacgaggccaggtgggccctgacctacaggaaggagatgggggaaggtaaaggagcaggtaaatatcaaagatgcatcctcattcttctgtagtcaacttgtaagacagctaacctttaaaatggattacttggtgactaggtcacataggaacatgtgatcactgtggctgccccaattctcttggtttttaagtgtgattctgaactatagcagtgaaaggagttgcctgtgacagggctgaacttgtggcctcgcccggcttgtccctaggccttaaggtcactctcacatggccacagatcggctctgggtccatagacttctaagttctgtccacagctctgagaccccacttggtcttcagccttggaggggatttcattaacatggtgtctgacttgtctgaaggcttcttggcaggaatcacccatatccaccaccagcaggcacaggaggacccacacaggagcagagggtgcccctgggagctgcctgggatggagggagtagctctgccgtgagagatggctcatacccctactgtgtgacaccaccgtagaataaagcgctgtggccaatccatcgagagaacagagctggagtgtgaggaggagcgtgccatccacactcctgcccgctgcttcccaagttcaggggcatcctggaatttcacaccagctcctcactttcccccaagctgcctctgcaggggtgagactgaccagacccacagcgagggagaggaaccagacatgagtagctcaggccctcctctgtgatgggtcctcctgggctccgtctgcagaggaggtgtcctgtggccattagtgctactcgtgggaagtgggcacttctgaggtgtggtgtcaggaagcccactgtggtcacacgcctgagccatgctctgcagacgccaacgtggctgatgttttcatccatcttctctgtcccagctggttcaggacttcaggatgagtcacttattgaaccctctacccccggtataatttggcacagtggtaatgaccatggatcccagagtgaaactaagcagtccagatccctgcacctctgcagtggtgcagacacgcacccattgtgcaaaccctctatgacttacaaattgcacatctgtaaaatggggtatcagccaccccgaatgctggcaaagatcaatgagataatcacaacctggcacagtgttagacctctgtgcattactgttacctcaataatcatcattattattccacaatatggagcccagtagcttggctctcattacttgggaagaccctgatgatgactgagcttctcagtcaaaacggggcccctggtgcagtgagtgtgactgtgtttgtgtgagctccagatggcatttgcaacagggggaccttgaacatccatgaggtggacccctggcctcactgacagcccttcaccagctcccctcggctctgtttccaggaaacacatggtctgctgagtcatgggaacccccagctcagaggttcctgaactgagtaacctcaacaagaaaacccagaaagatcaacaggagagggcagaggaggaaaacccacccaaggaggaagatgccaggggccttgctgcccgaatgcccatgacctgccctggttctatgctgcatctccaccacctgctgcccacccagggctgtgggacctcctgctgccacctggccacccccgccctgccccccgcaccgtgcagctctgctgtgccggcccctgtgtgaggcatccacctcctgccagctggcctgccgcatgctcaggtcgggcctgtgtgtggccgcctcctgcgggtcctccaggtgctgcccgcccttctgccccttccctggcctgcagacctgtgacctgccacaccggcctgctgctgatggattatcctgataatcaactctctgctattgtttagcaaaagcctttccctttgtcctattatcagaatccccctgcacttctcagtccctggtgacagatccacctcccactgtggctggaatttcccctgaacgttcttgtgcaggaaggcttagttctctatcaaaaataagtctctctgctccttaatagtgggtctttttaaaaatttccctgaagctgtttctcgttgtcctttgccttcctgaccaagacaatgtcagcatggggttctgtccttggtcactgctcagaggtggagcttgaccctgggatgtcgggaagacgctctgggaaaagctgtggctgaagctgctgagtccaaagggggtgtctccttcccagtagtttcagacgaggatctctcagccaggactcttctggagcctggaaaccaagccacaggacgaagggctgcgggaagaaggaggctgagcctggggaacctggtggctgccttcgggtgtcagaagggctttcccccagcacgcgtttccccagaggctggattggggccactgaggcggtgtgacagggaggtagatttcagctcagcaggaggaagggtcccctgaaagccagggctcccagtgacacactgggcgcctggtgattactcagcttctgggtgctgagggctctgaaaggcaggcacacttgtcccactgtatcataacagaaaaaaccggaacggcccatgtgcccattagctggtggatggataaacacagcgtgacagagcggtacagcggaatccacaccagcactgagggcggcattgcttacgcacacggcaacaggaacgcatcgcagaaacaccgcgcggggtgggagaggccggcaccagaggacttgctgtatgactccatctgaatgagttctaaaacaaggagaaccaattcatgctttaaaaaattctcagcagtggccatctctgggggattgggtgaaattgactggggaaggcagaagagttctggagaggatggtaaagtccagggtcctgatgggggtcctctcccagccaggagggaagccaggaccaccctctcccctgggccttgagggggcctgggtgagctgtgttgacagattggcaaacttcgtcaaatgatacccttgagatttgaatcatttcacatgcaaaacaaatgctgaactcgagttaatggcaggttgctgcagtgtgtgagtgaagtgtgcggttgctgcaccttcccctgcagtgcctgtgaaatatgatgcactgacagaggccggctcgggggtgagtatccgatcaagcacagtgagtgacgtgccaggtgcagatccagggccgggcgcgtggatgcccactgtttaatttttacaacttttctgtatgtttccgtttttcataacaaaatgaaaataaagatagtttttaaaaagtagttcagaagatgaaaacagtaaatgttttcataaaaaatagaagccacacatgagatccttgctttggagaattgggctatgatcagagggaagtggggtgcagagaattggggtacccagcattcagggagaataacggtggatcgcaggtcagccaaatgtcccagaagcagcaggacagtcatgaggaagccaacactcaaacagtgtggctgccccagggcaggatggcagacccagcccaccattcccatctccaccttcccaagaccaccacaggggagggcaagtgagtttaccaaggatgagggactccagcaatgaaaaggaaagagacggccgggcgcggtggctcacgcctgtaatcccagcactttgggaggccgaggagggcagatcatgaggtcaggagatggagaccatcctggctaacacggtgaaaccctgtctctactaaaattacaaaaaatcagccgggtatggtggcgggcgcctgtagtcccagctagtcaggaggctgaggcatgaacccgggaggtggagcttgcagtgagccgagatcgccccactggactccagcctgggcaacagagccagactctatctcaaagaaaaaaaaatgaaaaggaaagagaagggtgtgtgtggactgccgaccagggcagaggtgggacccacctgcctgggagccccacacagctctgcttcccagcaagcccagcggaaggggagtggggagggctgcagtggagagggggactgaaggtgtgagcatgtcaccccctggccaggacccctaaaggccccgaggggcaccaggcacagttctctcatgctggcctcgggctcccatcgcttttactccaaagtgaggctggcgatggatggacctgcgccccgagcatagagcaccaggccaacctccccactcaggtgggggctcctccagcagaaaacagaccacacacacagcaagagaggagcccgggcagcccgggaccaccctcaccccagccaggagggaagccagcggcacgaaaagcaagaccaagataaactaacatatcactgcacccaggggaaaccaatggtttaaggaacttaaaaaatcctaaatacggccgggcacggtggctcacgcctgtaatcccagcactttgggaggccgaggcgggcggatcacgaggtcaggagatcgagaccatcctggctaacacggtgaaaccccgtctctactaaaaatacaaaaaattagccaggcgtgttggcgggtgcctgtagtcccagctactcaggaggctgaggcaggagaatggcgtgaacctgggaggcggagcttgcagtgagctgagatcatgccactgcactccagcctgggcgacagagcgagactccatctcgaataaaaaaaaaaaaagtcctaaatacactcagatattcaggaagatgttacatctaccaaacaaggacaagatgctttgaaaatgaacaattagaacaatgatccctaaaatgtcacagatattaaacatctcattgatatttaaaattaaacagagaggcttgaaggtgagtgtattagggttcccttagagggacagaatagaatgaatatatatatatatatatatatatatattttggggggggttactaagtattaactaacatgatcacaaggtcccacaataggccgtctgcaagctgaggagcaaagagatccagtctgagtcccaaaactgaagaacttggagtccagtgttcaagggcagaaagcatccagcacagcagaaagatgtaggctgggaggctaggccagtctcgcctcttcacattttttctgtctgctttatattcgctggcagctgattagatggtgcccactcagattaagggtgggcctgcctttcccagccactgactcaaatgtgaatctcctttggcaacacccttacagacactcccaggatcagtactttgcatccttcaatccaatcaagttgacactcagtattaaccatcaccatgaggttgagaaatcgctctgatttggaacaaaacgtcaaagagataaaaaagaaatgaggaaaaaataccataaatgactgatctagtgaatgtaatccctgatgtgtgggagtcccacaaagcgggacagtgagaatgatgagcggatgcacaaataaactcctaaagaggagcatttcccaaggctaaagacacagtcttcaggctgaaaagaaccaagtgatgccaagaaaaatgaacggaaaaatcctagatatgtcctctgttgaaatgatataacatcaaagataacaagtggttcccatgggcttccagaaaatcaaacaaacaaacaaatgaacaagtcacccacaagcaataaaaatcagattagcatcagacatctcatcagcagcactgaaggctacagactcacagaacaacactcatgatgtccgggaggtcagcattcagcccacgctttcaaagatgagcatgctgtaaataaacaggttaaacagaagataagcagttcttaagataagcagtaaacatgacagcaaattattaaccataaaactattaagtaagcatatgtgtttttctaaggctaagtagcatgtattttatcctctgggggtgtggtcatttgcttttctacatttttgtttgtctgtttgtttatagagaaggggtggtcttgccatgttgtcagtctagcatcaagcttctgggctcaagtgatccttccacctcagcctctcaagtagctgggactacaggtatgcaccaccatgccaggctcttttcaaaatattttaaagtagtggaaatattttttcaaactgaatctgacctagaagtcaagtctgtaaaacagattaaaacacagcttctctaatttaaagtgggatggagaatccagacacctattagtttgtcctcctcccctcccttcccttcatctcccctcgcctcctctccccttctctcctctctccacacttctctctctctccccagctcacccccttacctaggtaacatctgaaatgtctcctaagaacatgattttacaaccttgttgctttgagtccctctctctccccaagctctaagagattacggaattagcatgtgcatcattaggccagggaacagagctgatagcaaagaatggcactcacccctatgtctctaacgtataactgttaacaacatatgttgtatcagccattactcacagctgactttctctataataagcttattttttcaagaatccttatgtccccatccgtacactaagaccctaagaactgagagacagaacatcaaggacctattcatccatattgttccaattgcaaaaatgcatgaggacattatgtattgataaaagattcaactcatcaaagatatgagaattagaaacatatatgcaccatacaaagagtccccacatatatgaagcaaacattgacagaattcaagtgagaaatagttctacaatagttggagactttaatatttcattttcaataatgaacagaacatctagtcagaaggtcaataggaaatagagaactgaacccactataaaccagttactcacaaaagatatgtatagacactccacccaacaacagctttactggtgaatatcaccaaacatttttttaaaatttaacaaaaacctcctcaagttgtgaaagaaaaaaatagaaggatcactttctaactcactctgtgaagcaaacattatgctgataccaaacccacataagacatcaaaagaaaagaaaatcacagacgaacatgacttgtaagtacagatgcaaaaattctcaacaaaatactagcaaagtgattccaacagcatattaaaaggattatataccatgaccaagttggatttatcccaggaatgcaaagatagctccagattaaaaataatcaatgtagtataccacacgaagagaatgaagtgaaaaaacccacatgatctcaattaacaaagaaaaggctttgacaaagtccaacaccattttatgattttaaaacactcagaaaactagaaatagaagggaatttcctcaacatgctaaacagcatgtatgaaaaacccacagcttgcattatacttgacagtgaaagactgaaagctttccccctaagattaggaacaagacaggatgtcccttttcaccaccaatattcaacattgtactggaagttctagccagagctattaaacaagaaaaataaataaataaaagtcattaaaattggaaaggaagaagtaaaattatttctattcacgggtgacatgatcatgtctatagaaaatcccaaagaatccacaagaaagctactagagctttattaaagaattcaccaaagtttcagggtacaagatcaacatacaaaaatcatgcatgtttctatacaccagcaatgaaaaatctgataaggaaattaagaaaaacaattccatttcaatggcatccaaaagaataaaatacctagtaacaaatataaccaaggaggtaagagacttgtacaatgataactgtaaaacattgctgaaagaattaaagaagacctaaataaatggaaagacatccatgttcatggattagaagacttaatgttgttaaaatggcagtactacccaaagaaatctacagattcaatgcagtccttatcaaaattccaagtcttttttttttccagaaatgaaaaagctgatcttcaagcacatatggattataggaactcagaatagccaaaacaatcttgaaaaagagggacaaagctggaggattcacacttcctgatttcaaaacgtactacaaagctacagtaatcaaaacagtgtggtactggcctaagaacagacatatggaccaatagaatagaactcaaaggtcagaaataaactcatacatttatggccaactgattttcaacaagagtgtcaagataattcaataaggaaagaataatctcttcaacaaatggtgttaggaaaactagatttacagatgggaaagaatgaagttgggcccttacctaatatcatatataaaaattaactctaaatggatcaatgccctaaatatggtagctggaaccatcaaaatcttaggagaaaagatgggaaaaatgctttattcccttggatttgacactaggttcttagatattacgcaagaagcaccagcaacaaaagaaaaaataaattggacttcatcaaaatttaaaacttttttgaatcagagaacactgtcaagaaagtgaaaagacaatccacagaatgaaagaaaatatttgcaaatcatacatctgactgtgactcaacaacaaaaagacaacccaactaaaaaataggcaaaagattgagtagacatttctccagtgaaggtatgcaaatggccaataagtacatgaaaagatgctcaacagtattactcattaggaaaatggaaatcaaaaccacaatgaatgctacttcacacctaccaggatggctgtaattttttttttttaaaggaaaataacaagtgttggcaaagatgtggagaaattggaaccctcatactttaccagtgggaatgtagaatagtgcaaccactgcggaaacattttggtggttccttaaaagttaaacatagaattaccacatgactcaggaaataaggagcacccaaaagaactaaaaataagtaaataaataaaaagagagaggctcaaatagatccttgtatgtcaacattctttgcagcattattcataatagccaaaaggtatgaataacccaagtatctaccaacagatgaatggatgaatggattcacacttcccaattttaaaacctactgcaaagctacagtaatcaaaacagtgtggtactaacataaggatagacacaaaaagcaatcaaatctaagagtccggaaataaagctattcattcatggtcaaccgattttcaacaagaatgccaagaccattcaatggagaaggaatcatctcttccccaaatggtgctgggaaaactagatttccacatgaaaagaaacatgtggtatatctgtatgaaggaatattatttatccataaaaatgaaagaagtcctgacacatattgcaacacagataaacattggaaacattgtgccaagtgaaataagtcagtcacaaaaaaaacaaatattgtttgattcctcttacatgaagtatctagaacaggcaacttcacagaaacagaaagtagaatagaagtgaccagtgacagtggggagaaggaaatggggagtgaatgtttaatggggacagagtttcagttcgggaagaagaaacagtcctagaggtgaacagtggtggtggttgcacagcactgtgaatgtacttaacccacagaattgttcacttaaaaatggttaaaatggtaaattttatgctatgtatattttaccacgatgtttaaaagataaaaatagttggctattttatgttatatatattttatcacaaaaaaaacatttttaaaggcagtcaaatggaagaataggcagttttagcacacatgtattgataaagtcataataaacaacaattattgagtgcctatcatgaaaataatgcacacaaggctgcaggttgttgaccttgctgagtctcagaaaagtggctcgagtagctcgtggaggaagtggggagaaggcggcgctcacagagcttcccgtgagccggtgcagcatgaagatcgaataaacctgctgaggacactccgggtggaatggcgtatcttctagctcttcaatgtcccttctgctcacacagagcatggagggtctcccctggacttgccccaaggggggtcgtgctttgccccaaccctccaggcctctgccacaggctggaggagctgcttgatgcagacacttgacctcggaggtgtttaacccagatgtccccagatcctctggccttctgaggtcactctttataatccaaataaaataacaagagacagtgccctccaaactgtggggaacctatccagcctcccccgaccccaccccaactcctgtggctttggggcattcacactctcctggtcctgtcctggcacctttgctcccactggactggacgctgtgctgtctctcaggtacgcaagtgcaccacagactctgatatgtacagaacaggcccctgggtctcggtccccaaagcacctcttctcagaccttctactgagaggtcgggggtcgggtcatgacacacagcaggaaatgaatgcacgactcaggccagaggcatcagctggtcctccctcccttgggcctctccctggccatgccccaacctggctcacactccctcagggttgcaatgacctccgatcccaagacccttttcccaagtccaatttttcctccaagttcctggtcccttgtggtgggccagtttattcagcttaggagaaatgattgttaaatattcagaatcttctcaagcaggttgttaaactgctcatagcttgaaatcagccaggatatgaatatttacaccacggatgacagctaacactccacgccagggttctcatctcaccgcagcgggacaggggtacacgccacacaccagggtttcatctcatcacagggtaatgtttacaacgcagagaccagcagacaccacacaccagggcttttcacttcaaggggcccatccaccacacacctcgagccctcacctgctggtcactgcctgtgggcctgaagccctccaactttccaggcagagccaagcagctctcccttaatctcaggatcctccaggctagatgagccctggggctctagagtcctcaaccacaaaggctgccgaatgtcttcttctcaaaattaaaaacaattcacttcccataaagaaatctttcaacctcctagaacaacccctctgaactctgaactggaccttcccttcacaataatgttttttcacattcccactcataaataaacccaaatcctctctctttagatggaaggagctccttttttatagctagacccaaccgtctgggcacccatcagatattttcacatcaatcccacaccgccatgtctaaaccatgctccgccccgctcttctcacacaatctgggtttctcattctgatttcccatgtcccttgctctctgaggcagcagaggttaatggctaagaacatagaatacgggcctgccaggcctccagtgtatgctcctctgcctgctggtgcagccttttgcacaagttcttcattgtgactcagtttctccatctgtagagtggggataataacagcccctactttacaaggttgatgtatgggttagtgaggtcatatttacaaacttgctcagaatacttcctgacacacagcaagacctatcacatgactgtttgccgaaaaaaataaaaataaatccagctcccaagccattcattggtctacggattcaagataaagagaatataaaacaagaagaaaaacatccttgactcaactgagtgtgaagaaattagggggaaataatagtaagcaataccaaatgacaatcacagaggggcggccaagggctgctgaccttctgtggtccacgcagaggctgggctccagcccattggccggctccctccacggccccacggtcccgctcagttctgacacctggggagcttcaggagctaagctacgctacacggttcatggtgagcatcctcaagaaaccaccccaaacaccaacaaggaaagaagcctggggccttgtgctgggacaacacacacacccttgagagatatataagctcctagcacccagacactcactcactccctccttcccatccagcacccagacgctcactcactccctccctcctgcccatccagcacccagacgctcactcactccctccctcctgcccatccagcacccagacactcactcactccctccttcccatccagcacccagacactcactgtctccctctcagctcccccagctcaacccccagcacggctgcatccaccatgtccgtctgctccagcgacctgagctatggcagccgcgtctgccttcctggttcctgtgactcttgctccgactcctggcaggtggacgactgcccagagagctgctgtgagcccccctgctgcgccccggccccctgcctgagcctggtctgcaccccagtgagccgtgtatccagcccctgctgccgagtgacctgtgagcccagcccctgccaatcaggctgcaccagctcctgcacgccctcgtgctgccagcagtctagctgccagccggcttgctgcacctcctccccctgccagcaggcctgctgcgtgcccgtctgctgcaagactgtctgctgcaagcctgtgtgctgtatgcccgtctgctgtgggccttcttcttcatgctgccagcagtctagctgccagccagcttgctgcatctcctccccgtgtcaacagtcctgctgtgtgcccgtctgctgcaagcccatctgctgtgtgcctgtctgctctggggcctcctctctgtgctgccagcagtctagctgccagccagcttgctgcaccacctcctgctgcagaccctcctcctccgtgtccctcctctgccgccctgtgtgcagacccgcccgccgcgtgcccgtcccctcctgctgtgtccccacctcctcctgccagccaagctgcggccgcctggcctcctgcgggtccctcctctgccgccccacatgttcccgcctggcctgctgaggcctctgctcaggccagaagtccagctgctgccaggcatgtcccccagggccactgggcactatgagtcccccacctctcccactactggcccctcggctgctctggtgtctgtctcttccttggagatgcgtgcacagcctctcttcccctaagccctgggggctcctgctaagctccagatgaccctgcctccacccactcccccggctcttccagaccacttcccacattccaggcccctgtggtctcgcctccttggaagctgctgtgcctcctctggccattgtaggaccatgcttggaagtcctaataaacaccctccacgtagcccggctgcactttgctctcttctttgagtcatttctggttgaattgctgaccagcccgacaggaggccaggacacagatgcagcctcctggggccctcgcgcccagtctcagcccttctccaggccccaacacacattagtctggcactggtgccgtccccgcaggaatgtaccagtcccagggagggtcaacggagcggccgtccccaccccagcccagcaggcaagtccgtctcccagggccctgatgggcgagtgtcagaggtggcagcggggtcactcgcaggcacagccgtccccaccgccccacatttccccgccaagttgccagtccctgccaagtgggggctggctggacacggagtcctggctgcagacagagaggatggctcgctccacctgcagcccagcccctcagtcctcacagggagattcagagtcccgggacaagcgtccaggctcagctgccaaacctctcccacctctccagatccagaagcggtccacttccttctactgcccctacaactcccgtgtctgaagcctactgcccagatcatgaatatcttgaagtctcttctaacagaaaatagataaagctccagccggggcaacagagtgaaaccttgtctccattaaaaataaaaaggccaggcgtgtggctcaggcctgcagtcccagcattttgggagactgaggcaggaagatcacttgagcccaggaattcgagaccagcctggccaacatagtgagaccttgtctctaaaaatacaaaaattagcagggcatcatggcacgcgcctgtggtaccacctacccgggaagcggaagcagaagaatcactcgagccgggaggcggagggtgcagtgagctgagattgtaccactgcactccagcctggacgacagagtgagaccctgtctcaaaaaattaattaattaattaaagtaaaaaatacatagctgggcatggtggcacgaacctgtagtcccagctactcaggaggctgaggtgggaggatcacttgagcctgggagatcaaggctgcagtgagatatgattgagccactgcactccagcctgggtgagagtgagacactgtctcaaaaaaaaaaaaaaaaaaaaagggttggggaaagaaaaggggtgcagccgaaggcccctccctcctgactgcagcctctgactcagtgctgccttgcacctcccagaggaagtgggtcctggtgaccccatctcacccccagctcctccaacacaccgttcttctcttccctcttcccacagctggccaagaactgcggtgctcaggtcgctctccctctgtccctcactctgccggccagcccctgctgcgcctggccctgtaacgccgtctccctgggcttctgggatgcgtctgtctcagctcctgcacccactcctctgacttttctctatgtgcgttctctccctgcccccaaactccaggtctccaaccaggtgcctcccctgggctcccagccacgcttacggcggcctccaggtgtgcccccagaccgaagggaagctgcatctgggcacatctgaagctgagctagcgtcttcctccaaactgccctctcccctgaccggctggggcagctggactccaccccgtcccccgccctgccctggccctgccatcttcactgagctgccagatatctttggggtctgccctgcctctcccctccaccatttctttagcttagggtgatttgctaaacagctctgggccagcagggctgccaacagtcctgtccacaggtaagagcatcctaggagacgccccgtgctttgagagtgccccatgacaacagagattcttctacagaattttttttggaagaaagcatgttctttgtccaagagaagatgctgattttggagaaagataggaagaacttggtgacttcaggcgacactctgccttccagtccagggttccaccaccaggaaggctggagagcaggaagaaaagggctggcagcacaaaggctggggtcgtgctgggtgtcacgtgtgcttggcagggagagccgttcctctgtccttgctggggcccctcctctgccgacccccagtgcagtccctcagcccatccctgcaatccctcagcgatgaaggacgggagagaggaggccagtccacacgagaagagccgagggagcagagacttcccagaaccccccttgccaaccaaacagcacacagtgagaggggcctggaggccccgggggtgccgcatgaggccttctattttgtcagaaattcacgatatccatgaagtccgtggtttgaatctgccttggggccgggcagtgggaacttcacggttaaagaactcctgggggccctgaagcctcagcccctcagcagtgtctggttaaacccacctgcagcagggaaaccttccacctaaaggcatcccaggcttgccaggcttgagaggaaattcaggtgtcactgttaagcctgatactgcctcgtggccaataaaaacagtggctgaccttcaggaagccttcgtgacctgttttgaaccacgtaatcctcacgtggccttgtggggtgagtggaccatgaccccatcttgcagaaaaggaaaccgcagcccatagggtgatattccaaggtcgtgcaagccaagtcagaggtgagaggtggacagaggcagaaaccaacagaaccctgggaaagggtgtggtggtgaaatgacaccccccagacaatgtccctaccctcatccctggaacctgtgaatctgcccttatagtgaggaaaagcactttgcagattgattagattgctgattaagatccttaaacattttttaaaccgacacatcattattgtacatatccatggagttcccagtgacgcttccatagggacagcgcggagtggtcgggccggggtgcccagagctcccaccatctcaaacacggactgtttctctctgcggggaacattcgataccttccttccagcgacgtgaaacgatatattcttgctgatttacagtcatcctacagtgctatctagaacagcggtccccaaccttcatggcaccagggaccagttttgtggtagacaacttttccacggactggggagggggatggtttggggatgattcaagcgcattacatttattgtgcactgtctttccattattacattgtaatttataacgaaataatcatacaactcaccatcatgtcaaatcagtgggagccctgagcttgttttcctgcaaccagatggtcccgtctgggggtgatgggagacaggggcagaccatcaggcattagattctcacaaggagcaacagagacccctggcatgtgcagttcacagcggggttcgtggtcctctgaggatccagtgcttccactgatctggcaggaggcggagctcgggtggtaaagctcactcacctgccactcccctccggctgtaaagctcactcacctgccactcccctccggctgtaaagctcagttcctaacaggccacggctgtagtggtccccgtcccggggttgggaccccctgctatagaacactagaacgtgtcccccctgagcagctgcaattctgtgtctttcggcaagtctctccctatcctccctgccctgtccttccacactccagcatctcctgccctgttttccttccgtgagatccacgttctctgtcttctatctctgagccaagttcagagccctgagatatgagatgatcctggcttagccagagagaccctaagtgccgtcacacacgttcctatgagagggaggcagggaaacttcacccaggagaggcagcgtccacatgagcacaggggtggagactgaagcgatggagcagagaccaccatccaccccacagagcaaaagctccagaggaacaaaggggcctccctgagccagtgcttccaccaactcctggcaggtggacgactgcccggagagctgctgcgagcccccctgctgcgccgccagctgctgtgccccggccccctgcctgaccctggtctgcaccccagtgagctgtgtgtccagcccctgctgccaggcagcctgtgagcccagctcctgcacgcccttgtgctgccagcagtctagctgccagccagcttgctgcacctcctccccaagccagcagtcctgctgtgtgcccgtctgctgcaagcctgtctgttgcaagcccgtctgctgtgtgcctgtctgctctggggcttcctccctgtgctgccagcagtctagctgccagccggcttgctgcacttcctcctgctgcagaccctcctcctctgtgtccctcctctgccaccctgtgtgcaggcccacctgctgcatgcccgtcccctcctgttgtgcacccgccttctcctgccagcccagctgctgccacccagcctcctgcgtgtccctcctctgccgccgtgtgtgctcccacctggcctgctgaggcctctgctcaggccagaagcccagctactgacgggcacgtcccccagggccagccaggctcaggttccccccaacctctcccactgctgacctctcagcacacgcactagtacacaccgcactggtacacaccacagtgtgcaagctggctgacctcataccctacaaccacggcttacctatccactacctccaagccaggcccaggaaaccatgagacagccctctcctattattgaagggccccgggtgttccctggtggaatattcccccatagccacaggaggtccctggccccccctgcccttctcctccaagccattggccgcccttgcccaccacgtgccttgcacaatgaataaactggccttccctgcctctgcgtgctcctctcccagcctagtgtttatttcattctttctcgggccctctatgcaaacacacccctggcttcggcaaccctagagacgagccacgtcatgggagcatttccagtggcgctgagttcccggctcccatccccacagcccaggcctcctggatctgcacctccaggcagctctcagggtgaccctgctgcaaatccaggattcaggtggtgatgtctctgatggcacatctggccagagggctccttggcaggaggggcctggtgcccccatgcctccctgtccctggtgagtttgaggaaccccggggacagggcccaggttggcttctgtgcagggccctctgcaggcacagctgaagctgagtgtcgctgtggtcaaccagctcctaggtgggctggggtggggcctccctctccccgggagccctggcattttactgaaatggccaacgccttctgtttgtgcttgtgaaggctaatggcaacacctcttctgtggccccaggtctagccgggcgtggcagaggtcagagggaaagaagccaaagggtacatgacctagggatcccacacaatgggatctggggcccaagctggccactctttgggggtttcctttggggccagtgtttccaggatccccaagggtcccacacccagcctcactccccgccagagccgcctcctcacctgctgtcccctccacaccacaccagtgccaccgcccagctcctgagtccccccagctgcagtggagctggaaccggctgggactgagaggggtgcacagggctgcaatcccaggaggccctgaaatccagcaagatgttcccaggacccttagtgcaggtctaagatcacctggcctctgtctgccctggagagtgtggggcagatgccctcaattgggccagcttttccagtgcactctccctgcaaggaccctcagtgagaggagggccctcccgcaattagaacagggttggtgtaaatgggttcagacagactggatcctaccatcctcttcctagcccctgggggtggggaggtagctgggaccctgccccctgcttccctgggtaccccacccccccaccactctccaggggtccctaccatggaacacggggtgagagaagccagtttcccacttccctggctgttggggcctgaaattttctgtagcctgtcagtccagactttaccccctctgtgacattatcagcctccttctagccaagtccacccccaacccccagggaacccaaaccgtgcggggtggccctgacctgccagagctgttggcctccagctggcgggtaaaacccacggccttctcagaacaggtttctcaacacatgagacagaacacaccagacttccaaggggaacacctggatggagctggttacccagattgttcaacaccgaggggcagcggcttgagggtctttccacgaaggcttggattaacaagaggagcagaggtctctccaggatgggcccacaggaaatttccagaagtctaccacggggaccagaagaggagcctcggtgggtgacagtggcaggtgctgcccactcagccatgcgctgcctccacacccatcactggggagatgttttcaggagaaagatgcagcagctcccacccagtgtcacgtcacggccccggcacgccatccacggaccctggatggagcccagctgcctccgggagcgcagtttaactacaaaggagccctggctgcccgccccgcccagacgcactgacctgttgttctctgtggctgctgatggcccatccccaaccactggtgactcttccctggggccccaagctcagcccctaaccccctgttgctggaagtcagggaccccaaacagagagaccggctgaaaccatggcagaagaacgtggattgtgaagattttatggacatttattagttccccaaattaatacttttgtaatttcttatgcctgtctttactgcaatctctaaacataaattgtaaagatttcatagacacttatcacttccccagtcaatacccttgtgatttcctatgcctgtctttactttaatctcttaatcctgtcagttgaggagggtgtatatcattccaggaccctgtaataattgtgttaactacaaaaattgtacagcatgtgtgtttgagcagtatgaaatgtgggcaccttgaaaaaagaacaggataacagcaattgttcagggaataagagagataaccttaaactctaaccgccggtgagccaggaagaacagagccatatttctcttctttcaaaagcaaatgggagaaatatcgctgaattctttttctcagcatgggatatccctgagaaagagaatgggcacctaggggtaggtctctgaactggcccccccggggcgtacctgtctcttatggttgagactgcaggggtgaaataaactccagtctcccatagcactcccaggcttattaggaagaggaaattcccacctaataaattttggtcagaccggttgatctcaaaaccctgtctcctgataagatgttatcaatgacaatggtgcccgaaacttcattagcaattttaatttcgccttggagctgtggtcctgtgatctcgccctgcctccactggccttgtgatattctattaccctgttaagtacttgctgtctgtcacccacacctattcgcacactccttccccttttgaaactccctaataaaaacttgctggtttttgcggcttgtggggcatcacagatcctaccaacgtgtgatgtctcccccggacgcccagctttaaaatttctctcttttgtactctgtccctttatttctcaagccagtcgatgcttaggaaaatagaaaagaacctacgtgattatcggggcaggtcccccgataacccccagctgcagatcgaggcctagtgcgagcacaggtccccccagacccttcccagtgcccaccaaccggcggcctaggccaggtagaactggcagcgcctcccctgctgcaacaccaggctctggtagaaacttcagaaaacatgcaccggcaaaaccaaggaagggtggctgcgtcccgggttcttccgcgcagctgtgtgtacacgcatgcacacacccacacgcacacacccacgtgcacacccccatgcacacgcacccacttgcacgcccatgcacgcacacacgcgcgtgcacccatgcgcacgcacccatgcacacacacgcgcgcacacacccacgtgcgcacccacatgtacacacccacgtgcacacacccacgcgtacacacccacgcgcacacaccgctgtccccagccgtgcagaacgatcctccctgagtccccggctccgacccacacgcagcactcgctaaacgcttcccacgcagtcgttttgctgggttgcgcttcacccacttctcagagggggcggccgaggcagaggtgtcggggatcgagcagctccgggcctcaggggtcgccccgccaccgttttcctttcccagatgctgggacgggggcagggaggggctccccaggctgaacccgactaggtcaccctagaagcgaggcgagcttctcttctgtttttcttcggcgcccctgagcccctgacagtgcccaagctgcccatgggattggattcgccagagcctcctacgcagaccccacccagggccaaagccaaccccaagccccaccaccttggtggtgtgggatgaaaagtgagccatcgagagatggggtccccccacccccaacccctccaaggacaaaggcgggctgggaagcacccgctttcacgtccgcccctgcccggctttcctagcggaattggcgccggcatcagttgggggttgtgggatcagtgaggaatcccgtggggtcgcctccatttatcagttgtgtggggttgggcgagcacccctagccccagcccaggcgatcagggcgcgaagcccactggacgcggatttgggattaggacgggggtgacagccaggaggaccgcacctgccctccccactcctgccgctccacccctgcccccaccgcaacaccaaggtctccaccaggaagatgggggtggggaaaggacgcggggtgggggggggtgcggggagagaggacacagggtcggaagggtgaggggtagtggcagaggcggaggccgaggccacgcagctgcggggcgcagggaggggcagaggaggggcgttcagatgggaacctagtccagacccgtcggggccctcgtgtgcggctcgttatcctggaaccagagaggctggagacccttggcttgtctggagcggaaccgtagtgtccaatagagtgtgtggggctcagccctaaagctaaacattctttatttcctgatgaccatgggggcggagcgggggaaaagccctggccttatagtttagaattttataaaaggaaaggcgtggccactgacaatttgcgcttcaggagtcccagagtgaccgcctggctcggagcagggaatgagggggtccttaactctgagatttgttttctgagagacaaaggtgatgggtgaggcggctaagcctctgattctctataggtggcggtcattcatttcagaacatgaatggattcagtaaataaacatgatagaaaaatgccacaagccctaggcccattggagtggactggacagtctgttcccagtgtgtccctcagcctcggtcccccacccttcccggagccctgggggtcacacacatccctcctggctgcctagcctgtgccccccgattccccccctccccgccccgcgcgtgcacacacacacacacacacacacacacacacacacacaccacacagcacgaggcgacagagatatgagagagagcgagcgagagaggacgggagagagagggagtgcaagtgtgcgctgggggtaacccgtgcatgcatgcattgggggtaacaggctggagctcagatccctcccccagcccccagcaggggggactgcaggctcctggtctgagtggggagctgggccccctggacagaggactgggctgcggggtcaggaatgggcacacttcctaactgcaggacactctaagggctttggtcatgcacacgcagccaagagaaggtgtcgctggcacacagccttccaggagcggacttggagacctcgccaaggaccaggactccccagcactcacactcccttaggcgctgaagtccagaggacagaggttgagggcagagctcctgggagcaccagtggaagtaggagggctgggctggaaaacctcccccaacctcctattgcaaagaggctccagccagcagcctccacaccccagtgatcttttaagatgcaaatctgcgccatcatttatttcctcagtgccttctccagctcctgggatgcacactgcccgtccccaggcccagagacctgaccaccctcattcctccctcagcccaccctggggtctctccaccagctgacagccttcctgcagtcccctccccgaatgctgctccctgaggccctcctggacacctgcagggcaggcacagcccgcgggacctcacagcacttgctccgggcagagctgcagtttggccaagttgccagctccgtgtgggcaggggccctggcctgtggctgccacatcccgggtgggggcacggcctttcctggcgtggatgctgagcaaacgtagggggaaggggagtgaatgaggagagccaggtagctcaggggctgaggcctcactgagcagggtcccgcgtgaccggtccccaccgctgacggttcctggggtaacactcaggacagggagaggcaatggaaagagacgtggccgccctcgcatcctgcagctcccgcactcccagcctcccagcctcccacccagccccccagagcccaccagtgaccccgcccactgggtcctcagatggctcccacgggatctcctgccttgatctcctgtccacatggaggtgaagtgggttgctctgaatgaggggtgccgagcctagggcgcagcccactctcctgggtccgcagcatcacgcagcccggaccacaggctccttacaagaatcggaagggtccctgcaatcgcccttcgcactgaggcttcctactgtgtggtgtaaaaacacaggcttgtcctcccttgctgcccacggggctggagccgcctgaaaatcccagcccacaacttccccaaagcctggcagtcacttgaatagccaaatgagtcctagaaagcgagagacgagaggggaatgagcgccgaaaatcaaagcaggttcccctcctgacaactccagagaaggcgcatgggccccgtggcagacccgaacccccagcctcgcgaccgcctgtgacctgcgggtcaaccacccgccgcggctccacgccgtgggcacagactcagggagcaggatgagaaagctgagacggcgcagccacggcccggtgccttcacgcgcacagcgacacagccccagccagcggggcccacgctaaggcggaatcccacagaagcctacagagcgagcgcgcgcctgtgcttcccaaaacggaatggaaccaaggtgacttctacagaacgatctgaagccctggctggcccttatgctagtctcttgggagcgttccaaatgcagctcaatattacttacttgacttttatctttcctccctggttcgtggtatttataactgggtcatcttttaactatttgcaacgtagcttcaggggagagggggagggctttataaataacctgtattattattatgcaggttgattctgttccctgagctaaagggaacatgaaaatacatgtctgtgactcatgcccccccacccccactccagggtgtgctgaggagtctctcagctgccccggggtcctcgagcaggggagggagaaaggctggcgctgcgccctccatcgcgtgaagccaggggattttgctctgcgacaagctgacttggctctcgtattgtttgcagaatcacccagttccaaggcagtccctgcgggcaggtgcagctgtgcgggagcttcagtcctgtccccaacacccaggcagtaatggttccagcacggaaggtctacctacctcccactgcacagcccgagggctgtcctggaggcacagccatccgtccctgggtgggcaggcacgtttatgacccccacccccacccccaccccccacgcgagtcagcacgttccatactcgggtgatcgtgctcatcccctggtcatgtcatcgggatctgagtgccatccgagcagagagctgtggcccggtgccgggggtggacttcatctattccagggaaccaaggatgcatgatttgcaaacaaaaccagaagcgcaagccatctcctcgcctcccctgatagccgtgctgcggagcctgagtgctggagtcactaatttactgtccagtaactgagtttctagcgaccaggtctagttgtcgtgttactttattaaattttggtttgataagtaaaatccctcagtagaaactctagaaaagtattagcgtgtcatggtcatgagcaagccaaacagcctttctaaaaggtgggaaggagacccccaggcttcgccaggaccccccagtgagccagcccagggctctccactcagaccagattacgccccaaagaaccgagcccttcactccagaggtggttgtgtttggggctgtgtctgtgtctccagctttttgctcatgtggggaaggagcagggccggtgtggcccttcgctttgctgagtgcaggctgggggcacctccaccagctaaggaaatggctcgtgcacagtagcctcccgggctgctgcgacttcattcttcattcccaaagcaggtgtcagcctttcccgggaggcccagcaggtaagcacttgtggaggccccggtggctgctggttagctcttgaagctcgtccccaccctgcgtgcgttctaaagagccgcgtttctattgcaactgcctgccctgcgctttcatcttccccacctgtgctcctcccgcctctgcccatctccacagggtgctacctgccagtcctgccaaagcgtcctcgggcaccgcggcttgaatcagtgttagaaagtggcatttgtgactcgacacccctcccagctccccggcaagatacccccgcccgagttcccatgcccctgccttacctgtgcagggctcccaaccctgcgtgccgtggccgggggccgccaggggcagcacaaaacacagactcagcagggcagacatgaggggcttgggtgccaagctccatccagggctccgctcagcctgcagggaagtggctgctcctcagacgtctgcgtcagcctttccaggggcggccgcggggcccccgggggtcactgcgacggccacatgccagcggcctaaggcggggacagaggtggccctggcggtcgcagtggggaagcttctggttgctgcctgcgggaggcaggtggcccctggcaggttgggctgcagccgctggtttatctcttcatttccctgatgggcttgggccctgcgtgcaggtgacaggtgataacaatctcggcccggcctgggattagtcgctggcaaagcacactttccaaaaggaaagacagaaatagatcgtgctgcggagagctgagaacaagccagagaaacttaggagacccgtttccctcaggcgcaggctccctgggctcaccgccttttaggaccaggggcacaggcgaccatggcaggccgggagcgggtggggcgggtgcactctggctgggggtttgggcagcaggtccccacagtctgctggagggtcccagaggcaggtcggggctctgctagggggtcctagaggcaggtcggggctctgctgtggtggggagggggggtcccagaggtaggtcctgtgctctgcggggggtggggggtggtcctggaggcagatcccaggctctgctgggggtctaggcggcaggtcccgggctctgctgggtcccccggcggcagcggccgtccatccccaggaggggctgggctccctcggagggctttttatctggtgcccagccctcccgagggtgtgtgggtttgtcaactgttgggtttcaggaatttccctctggagggaagtcggtccttaaagggaacagctaatgagaaggagtgggtgagtgtccctcagggaaggggcacggccatggtcactcatccagagccgaggaccctcgcatctgacctctcgacactgcaatgggcatgccactcgaggggagcagctattaactagaagtattctttttacaaaagtgccctgcccccctaccctctccaaacagcactgaacgcagcattcttgcagaaatctccaacgcaactgggtgctgcgtttctgtgcctggtgtggaggccctggcaaactggtctgaggccgatggctttccctggttcacaggcccacaaagtgcacacactcctgctagtttcagaaggaagcccccactctgggacctctgacacaatgagttttccaagagcatagaccctgtcattagggcttgtggagagagacagagatggagggagggaaggagaaaggggccgaagagagggacagagactggggaaagacctagagggagagggagaaagtggggaggcacagagagctcctggggctctggaggctcttcccataaacagcccctgcgatgggacaggctcattctgtctccctctcgcttcctcttttacccggccctgcccccagggatattaattcatagttaatattaattcacagatattaattcgtagtcctattta

SEQ ID NO: 647 - DNA, 4352 bp, Homo sapiens
  source 1..4352: mol_type = genomic DNA
aaaaggaggtgagagacaggcaaggaatgcaggaaatgcctgaaagaagttcttcagaggcatgaaaaatcagaaaactggattcatttctgactcaatcttctcttccacagattaaggaatacattttccaaaaatcaaacttaagaagtaaaaactctgccatgaaaatatttaaaatgtattatgcatcaaactatacactatactagagggaagtcatatacctactgtgtagtgctgaattttgtttcagtaagcatgtgtaatttcatctttttaaccaattaaattttggtttttttgagactgagtctctctctgtcacccaggctggagtgcagtggcactatctcagctcactgcaatatctgcctcctgggttcaggcaattttcctgcctcagcctcccaagtagctgggactacaggtgtgcaccaccacacctggctaatttttttatttttggtagacatggggtttcaccatgctgggcaggctggtctcaaactcctgacctcaggtgatccgctgccttggcctcctaaagtgctgggattacaggcatgagccaccgtgcctggccaaccaattaaatttgttaaatccagtataagagatcagtgttgataaaaacagaaacctgaggccgggcgcagtggctcacgcctgtaatcccagcactttgggaggccgaggtgggcggatcatgaggtcaggagatcgagaccatcctggctaacacggtgaaaccccgtctctactaaaaaaaaatacaaaaaattagctgggcgtggtggcgggcacctgtagtcccagctactcaggagcctgaggcaggagaatggcgtgaacccgggagactgagcttgcagtgagccgagatcgtgccactgcactccagcctgggtgacagagcaagactctgtctcaaaaaaaaaaaaaaaacgaaacctggttttggtggcacaggaaaggctcctcacacctgtaatctgtgcatgacacatcagtagggatgaagggttccatccattccctcacccaaaggcctgggattgccctttcacctcctcaatccatggacaaagcagccatagacaataaccaaagttcacagcagcacagccagttggggccatagtttgctgacctctggtctacagcagtggtacctgcttctggctgtatatgagaatcaccccaggggcccataaagccactaatgctcaggctccaccctccatattctgaattaaaaaataaaacaaacaaaaaaacctactaggtgattctgatgtgcattctgggctgaaaacagctattctagaagaactgtacattgtagcctctcaggaaactgctagaatgttgcatgtggggagtgctagggggaagcagatgaatgctgcgaaatgatgatccagggctgaattgaggtctagataaagattagaactgttttcagtccacctgacacattaagtgcttccaatactttgattaaatgttctttatttgatgcttttgtgtgcacaacactataaggagttgcccaattcaccaagtcagcccgttcacacccttagttaaggtggccattaaggggccagggggtggcaatcagtaagctgcctcctgcctaactctctttctccaaccattctctataggctccagcgtagttgcgagccctgtggagacaaagaagcgtgagagactgacaggaatgacaggcagtccccatcacctcccagctagcagccacacctccccgtacccagtgtatccaagactccgggccagctgcgtggcctggaggccccgcttgcccatctgacagaagaaaacgagatgctcatcttccagctttggcttctcagcagaatataaagcctggaaggcagctggctccatctgcagagcactctccaactcggacactggaggagtggagagggtagaagggaaagccagcaatttggcactcaggttcggaagctgggcctggaagggctgggtcctgggggcccccaaacaacatatgataaccatcccctacccccaccccaatttcaaggaacagaaaccgacaacttttgaatgcaagccactccctaagctgtgaggaggcggggcgggatgccccctcaggcgtccagatttggggaggtcaagagaagctggtctgcccctctcctctccgcctgctgtcttctcaaactggatgggccagttccgatgccaagatccgccccccatcagtccttcctacggaagctgagggctggctcccgggaatgcaggacccccataatcagtgccttccccattccatcctaaatgaggtcccattggcaaagaacctcctgaacggtctctattccaccacctgggcgtcccctctccaccctatacccgggatgttgagcgcccctgggatggtcccagctgccgcctcctcgcgagagcgcacgtcgaagagccgggcccgtccggaggctaggagtgaacggagttcaggaagcgagaccgtgggcgctgaggaaggggcgcgacagccttcaggaagagggggcctaggagtcacggccgccatggcatcccctcacctggcagcgcccctcccggtagggtgtgcacgaagacccctcagccacgccccttcgctccgccaccccactccctgccacgcctcaacccagaggaccaagagaaccgcggccccaggaatcccccgcaggtacctccagccatggtgcgcgtagcaaccgcgagtctccggagtgcggccctggcccgccctctcggcgcctgcaacatctcccgttccctcccagagctgagaccggatccggaagcaagggcaccgcctcccgcgccgcccccgcagcacctgttcgcggcgcctctagcaccaacccaccgcagaagcccttaacattctctagcttgggccaaaaacgacacaccggtctggcccaggaaccaggactccgggtaataaatgcaggagcagcaccccaccctgaacttggcacagcccttactggtcgaagagcaatgtgcccctcccttccagcccgtggcccacaaaaggaagaaaaacagacaactgtggctttgaacaattttatcttaaaaaaaaaaaaaaaaaaaaaaaaaaaagaaaagaaaaaaaaaaaacgacccccacaagggggaaggccccaagtgggcccctgcctgttgttctctctggctccagagatgtctgcataggcctcagcttctcactggccaatctcctcttcatgggcaccagccactgctaaacatccttccctcacttcttgtgtaagcttgctcccctgagccacaggttgcacatctaaacctcagctccagggaaaggaagaaccaatggaagtgccagagtcctggggcaagccagagcatcacctgtcagcaaacctctgctgggcactctaagcaagcacaggacaagccccagagtttagtgtgtccagtatccagcatggagacagcacatgcattgtgcgagaggagcacaagggcccaggggctgcatggtgggggtgggcaaggctgtcagtgcacgtccacattgtgtgtttcacaccactgcaggccgccatatcacagggcctcagttcaaggacacaccttctgaacttccccctgtcccatgccagaagtggggcagtgaaggaaaggggcacgggattaggctgttgctcctgggctatctgcagttcttgggcccaaagcccctgaatccccatagttagttgctgtcattcttgatgacgacctctaatccgtggtgccgcaactgagctcgaagcagcagattcttgtttttaagatcttccacctgacatgggaaggaggcagtaaagggaatgggtagtaaagctggcacttccaagcccctgaatgtattcagacatccactggtgagggggaaaagatgaagccttctccatggagaacaaagtagagggtgtcaaactgggtcagtggctagcagaactgagaagggctgcactgggggtaggagtctgacctgttgtcgaagcacgtcattgtccagctgcagttggtcaagtccctgcagttcttcagacaagcggtggttactctgccgaagctcctggatataatcacaagctttggatagaatcccacctttactctgcaagataaggtcaacaaaatgagaactaggatttcagatacccagcttgctttccaaaagtaggttcacactttggacctcattttcatctaaggaaggtggtataatatctcccagggatacaggaacctcagggagagataagactact

SEQ ID NO: 648 - DNA, 61767 bp, Homo sapiens
  source 1..61767: mol_type = genomic DNA
cccctctggcgaattccatctctaggggctccttgttccctgccaaacaggtttccataaagcactcatttgccaagaagttccgggtgtttctgaccgtgaacttaagctcaagtttcccctaaacctgctttttttccattggtaaccctgcacataatactctgagattttgtttagaaaaacagactgaaatttctttagggctgtgtgcatgtatttggggcatgaatgaatgtgcctattagctcattctgttctaaaccctatgattccccggatgtcacgtgccacctgttcctactgactaggtaccaggcactgaaaccaccattgcaaaattataactgagatggtgaaagggatctgacctaaccgactccatcttgcttctcatctccaagctgtctttgttcattcctaggcataggccaaactaactttggggggaacttagtttatagtgtagctttgaaacaaagacaataccagccctttcccaaacaaacccccttcttgcccaggaactagactgccttttcaggactaacaaattagccacaaaattagaaattatggtttaggagtcatgcagctagaggctgcaagattctaaacctcaaattgctcctggggataacatcaactattgtaaaacctaagatcagtgcttaagatatttcacagacactgcactcgatggatcagctggcaccacccagatgaataaactggctcatctggtcttatgacccccacctggcaactgactcagcacaagaggacagctttgactccctgtgagttcatctcctagcctaccaatcagcactcccgactcactgacccctacccaccaaattatccttaaaaactctgatccctgaaagctagggagactgatttgagtaataataaaactccggtctccctcacagccagctttgtgtgaattactctttctctattgcaattcccctgtcttgataaatcgactctgtttaggcagtgagcaaggtgaacctattgggcggttacagcactttaaccataaaccttatgagaaagtgccatttctccatttcacaggtgagaaaactgaggattaaaaaggttactcaaataactttcctaaggataaatgtgtgagtcttctaactcacacatttatcaatgaacaaaaccggattcacaagtacactggagactttacattttgggcaaggatattaagctaacgggagtgagacaacccttcttcagtagaaaaaaggcgagcagcaggcgctgctttagttaccagcactttgcttcctccgtctccccgcgccaggcatcgggcatcccaacctcgactttggccttcaacttggcgcgctccggagctagagctctgcggtagcgaatctgatcgcgtgtccatgcccgccccctgtcccgcctcctggcttttgaccccgtccttggtcccgccccgggccctggctcctggccccgcccttggtcccgccccgggcccctggctcctggccccgccccagcccaggcaggtcactgcgccatttcctgtccaaagctgggcgaatcaggtcggtgccgcggggtaccccggaatcccccctgggagctggtcctgcactggccttcagagccgagcagaggacgctgctttgggccccagagcatgggaaggtcttggctgcggtctgggacggctgcggtctgggacctgcatggagggcccgggacttgcggacgcctgggagcggttgctgggcaacagtgcgtgcggcctggcctctttgcgcccggcgggcagcgcgcgtctggggcaggctccgcgcggggctcgggcacaggtccccgctgccgcagccctaccgagtgaagcactgagcgcggcgccgcttcgccatcacctggctctggccctctcaccctagcgtaggggggcactggccaggcagtgaggaccctgagatccatgccctgggagacagaggttgtctcctgtccatgcacccgcgcgcctgccttctaaccttcataccgttgggcagattaattcactggactaggcctctgttccgtgggagttgaaaagatttgacctggaagaaaccctagcgattattcagttaagccgcaaccccaccccctgttttatataggtaagggtgcttcacggtgaggactcgtcgcgtgcctggtgctttacatcagtccccagaatagtcctcgtagtttctctcttactgttcccatagtatgggtgaggactctgaggctcggagaggttgtgaatttagccagaatcacacagcttgtaactggtggagatgaggacactgagactcgattaaatcactcgtagtttgttcgtggcagattacgtgttagaagcgtgttacactactatgaaacctggccataaatgagaatcacctggaaagtgtttaaaatctatattcgtgtctgggcaatgtcccgggtttactgacttgaaatctcgggctacggctgaggaagctgtatatttaacaatcttcccgatgatttttatgatctgtggatgaaccactgagtactgctgggtacaccacggggccttctcgcacaaaaacaactgtaaaataatatctgaggtacctagagcagaagagacgctggtgagcatggtaacattatgttctaatcccttcagtcaatttgtaccctttcttcactcttcagaaacaagccaaaggcagattttaaacaagtatggacatttagatgcaaattgccccaagtttgttacctgtcacacatccacatttaagcttctgactagaccagcctgtcatgatcaaagtcaggtgttagtgtatttctctatccttggcaacctgtcatctgctctcttctcatctccatgccaggtccctaaatcgccggggttgatgttggctttggaagaactatttgcagagcgttttctgcactggaaggagggctggaagctttctggaagcattgccgcacgtaaatgagtgcctcttggcctaaaacagcagttggaatgaaagggatcaccctgctgttattcattgacataaacaaaactgtcataaaaataatcacttggctcttagttttagaaggctaataagcctgaccgttctgtttagtgctttattattattaatttcaccattatgctgcatcccttagggattccggttcacaatggatgctgataaagagaaagatttgcagaaatttcttaaaaatgtggatgaaatctgtaagtactagtaaatcataaattaatttctgctttagagaagtggagtagataaatgattgctctaagttcctgggtggcttgacaggtttataactcttaggaaaaaaatgtaattgaaattaaagagaagggtattgagaaacaagttatagcctcagggctgtattttctggctgttaattggtatcagagaaactgttaacattctgataggaattcaggctgacggttttcttccatattttgtatccttctatgtggaatccagtcaaaaccagctgctgtttccccattgacaatgaacccagctgttcccttcaagggtcaagaacctcattgatcagtgtgagattcctcccgttttagagtagagccatttctgttttagagctgcagaggcaaaatcaaatggctttcctttaggatccatcaaattacatggatggtttatgatcatcattcccttctctctctctagacaagaaagtcctttcccaagttcaggcaggttggatctcaaagaaatgtactctgatcccacagatcacattcaggaatttccaaacctgtcagtccctgttcagggagcttgcttgagtatagaaacaaacaaaccaacaagcaaacagaccttacatagtaaatacaggcaatatgctgaaattgctgcttgtagcagattgtatgggttcaaggaataaagtggttttaaagctagcttgggtgacatcgtaaatgatacatgaataatgcttatccctgaatgctgttccatggagctctggccttggcccactgccacctttctcttcagctggtctaaacatgtagctttacctgccacctgtttgttcatgacccccacatctacatggacacttagccttcttttctgagcctctgcctctatggtactgtcatacctactgtatcccacaaataaacttaaatgtgtccaaaattgaggcatcatctctttccctcccctttgccctccccctcccaaataaaacctgcttctcctaccctcaccttcatcctggtctcagttggtgacaccaccatccagaaatttacaggtcatctgggactcctcccaactcataaccctgcatccaattagccatctagtttggttggagagccatcctctccagccctccctttgttctggttcttctcacccagactatgtcaacaaccccctgattgtttttcctgtctccaggcttatacttcccacagagtaatgtatctaaaatgcaaatctgacccagacacttctctgcttggattccttttgcagtcataataaatcccaagctctcatcaggacttaagtcctcccatgaccttgtccttacctctctcatatctccctacctcacgcttgagcagcaataaactgctgatacttcgccacacatactctgtgtttcacactctgcactggatctttgccattcccactgcctcttcatctttttttttaacctggctaacttatgcatactcaaagttcattcaggtatcatgtataccagtgctgtccaatagagctttctgtgatgatgaaaatgttccataatcctcactgtccactatggtagcaactagccacatgattattgagcatttgaaatatggcttataactccaccctgtggtctagtgcttagggttctgtgtgtttgtggctgcagcccaggtttgaaatgcggcttgtttcaattaatttaaatttatgtagccacatgtgtatagattctgtacatttacttcttgggctcttgctatgtgttgagtgttggtaaggcctagagaatacagtcaaagaattattcttttcatggtattaatagtccagtggagaaaacagatattaaacagtaatttcaagtatgcaatatgagacacagagaattacaaagtgtagggatctaacccagctttgggaggttgtattagtcggctagggctgctgtaacaaaatagactggctggcttaaatgacaaaactttattttcttagagttctggagtttagaaatctaagaccagggtgtgagcaggtttggtttcttctgaggcctctctccttggcttgcagatgggcaccttcccgctgtgccctcacatggtcatctctctgtacgtgcatatatttggtgtttctcttcttacaaggacactagtcatattggattagggcaatgattagttacttctttaaaggccctatctacaaatacagtcataccaggagttatagcttcaacatgtgaatttttgggggggatgcaatttagtccataacagaaattaaataaagttttccagaagaagtgagatttaggcaaaatgtgaagagtgagtcggagttggtcactgggaaaatgacaggggagtgtcctgggtgggaagtaaggaggtaggaaagctaagagtgaagaaagagtgtggtgcttttgaggaactaaaagaataaaaagccccaaatgtctggaaagaagagatcaaggagagaagagtcccatctgaatatggaggggccagattaggaaagaccttggaaaccatggtaaggaatttgtgtttaccgagagcagtaaatcaattccatctaatttatgtaatgactcttcccccaaggaggtggagcatctctaccccttaaatgtgagatacatttagtgacttgcttccaaagagtacagtatggaaagggagggaagaaagtaactttacagtggaaaaggttggcaaacacaatttcagatagatgatcaaggttaacctcctgataaatcacactgatggcatgcatccctgatacgccataatgtgccatggtctttttccccaaatcctgtaactccagtctaaccgtgagaaaaataccagataaacccaaattgcaaggtattctatgcaaactcatagaatgtcaaggtcatcaaaactgtcaaggtcatcaaaataaggaaagggtgagaaattgtcgcagcctagagaagcctaaggagacatgactaaatgtcgtgtagtgttctggatgggatcctggaataggaaaagggcattagggagaaaaaacaatgaaattagaataaagtgtgcagttgagttaatttaaaaaaaagttaattaaaagacatgaaagaagagctaaataaatggagacgtatttaatcctaggaagacttatttggtaaaaatgtcaatttttaaaatattctatgcagtaaatacaatttagatcaaaacccgcaaagtagtatgtactaaaattcagcaagctgattccaaagtttacgtggaagagcaaaggaccaagaagagccaagaaaactctgcaggaaaaaaaaaaaaagcaggacaactttccctacctgacattcaagatttattataaagccatagtaatcaatgcatggaggttttcgtgctggaaaggacaatcaggggaaaggaatgaagagcctggagaagatttgcacacataacagggatgatgagacacattgctggcagggacttctcaacaaataatgctcctgccctacgtgaaagtcaactctaggtgaattacataccttagtaagaaaaaaactttaaaacttttataagacaccataagagagtatatttataaccttactgacacaaaagacctaaattgtaaaggaaaagatggtatatttaacacactaaaattaaaaagaaaatctcttcaacaacatattccataaaaacaaatgaaaagacaaagaatacccaaggggaagatgtttggaaatacatgtaaccagtccagaatatatacaactgatacgggtaggagatgggaatagtggatagaagagggtggttccctggcaaagaccccaccctcaagccgggagatctgcagcgctaagtggaaacaggcatttctgttttcgtgcccaaaaagttgccttttggcctgccatgctcccctatcctgtgcccatgtaaactctgaaccccaggctccagaagcagacgagcaggtgagatgaggacacaagcagacaaatggcagaacgacacagtagagaaaagaggaggaatgtctgaacgccgagaggagtttggctgggagcagccagaggggagttgggccactggatggccaggctccaggggaagatcatctttcccctccattcccccttccagctccccatccatcccactgaaagccacctccaccactcagtaaaaccccacattcatcctttagtcctgtgtgtgacctgattcttccggggatgctgggcaagagctcgggatacaaaaagctgtcacttccctctgcccttgtgaaaaggcagatgtccgtcaagctggttaacaatcaagtcgtccgcagatggcagggctaaaaggacacgctgtaacacgtgcccaactgggctcctgcacttgtccgtctgcgttctccccctcccctcaggggtttgagcagtggtggtgactaaacaggcaagccacacccctgtcgcatgtcctgcgagggggatcagagaactcccctgtttcacaatcaaatcaaccaggcatggtggtgtgtgcctgtagtctttgctactcaggaggctgaagcaggaggatcgcttgagcccaggggttcaaatcgagcctggacaacatagcaagaccatctcttaaaaaaaaaagaattttttaaaaaagaaattatattaactaataagaaagagacaatgacccaatagaaaattggccaaggataggagtaggctcttcgtagaaatccaaatgggtgcaaatcaataagaagatgctcaattccaatcaaattcagcgaaatgcaaattaaaacaatgagataccattcccatccattacattgacaacaattaaaaagtttaacccagcaagtgatgataagaatgtagaagaatgggaacttcctcttgtactcttttgtaggagtaaaaattggtacagccatatcctgaaggatatgtaacatgtgcacaaggaaatatgtacatacaggtattcaattcagcatttatttactttagaaaaaactgaaaaaccacctggctatcaataagagaatggattaactatggtatatataatggtttaaatgaatcaactggaaccatgtgtatcaagaacacatctctaaagcatcttaagagaaaaaagtaggttgcaaatgaatgcacattttatacaactattttaaaaaattgtttaaatattacatacacaaatattctggtagattgcaagaatggttacaaattcctttcttcccatcaagagtggagcctatttctctgccacttgaatctgggttggccatgtgtgttgctttggccaaaaggatgtttgcaaacatgacacaagcagaggcttgaaaagtgcatttgaattagggcttgcactcataccactcatgagaaagtaagacacacttacccgggttgcttgcatttctcaagccaacagccagcagactttctaaagcagagccacttagatgactgacagttgaccatggatatatgtgtgagtccagctgaaaccagaactggccagctgaattcagctcaaattgttgacatagataattgtaaactaagccacaaaaatggtggtttgtttcaaaccactaagttttgatgtggtgtgtgatgcagcaaaatctaaatgatacaaatactaagtattaaagcatgctggagaaaagataccatcaacttataaatggcatagaaacaaaaatattatattactttcggtatgcttgaaatattgtacaattaaaaatttataatttccttgaagactcagtgggaaatgaagaaattagaacaggaaaatgaattaagaagtttaattgtgaaggggaggagacagagcattaggagagatttaaagtacataatttagaaggaagctggtcgaatggaataggttgaaaatattgcgcaataggattattaattggtgatgcagcgttcctgattatgcaaaatatgacaatggaatcctgggcccaggatgagggactaaccttacagaagaatgggcaccttttcctggtagtaaggaaggatggatgtaggtataggcagttttgtagttttaatagcaggaagtcgatggcatctctttcctctctgaattgataaataagggcatctttttgagatggtcaggtttagattgcaaactgttaaaagtcattgggggagtgacaggatatcttgcccaggataacaaggattgctgggcatcactgaaggtccagttgagtttgagtttggaccagtcccccaggcatctatctgtctccctcagtacatagcattcctaatgcagactggtagaattgggtaattggaattatgtagagctggaattttgtctgttaggtgagatagcagggcaagggagttgagtatatgggcaggatggctgctgagtgattgaccatggaatctaagctggataagcagtaaagtgaagacaggtgaggatagggttaagggctgctgttttgcgattttgagctgcctgtacttacatgtttgtctcccacacaagttcataaactcttcaaaaaaggatctttttttattcatcattgttatctatagcatcagcataatatctaactcataatgagctctccataaattattgttgaattgaataatggcttaaaactctgttccttaaagctaatagctatactcacctgcaactttttctaggcaaaaaaaaaaaaaaaaaaacctgttgttaattttttctcattggttctgcttgctctattttgctttctattgctctatttttttctttaagatctttcccatgcattttatgcaccatcctttctagtgaatagagtcttttgaatatcttgtttgattaagtcacacctgatttcttctctagccaatttaattcaggagatgaattctgatgacccagttgtgcaacagaaagctgtcctggagacagaaaagagactactgcttatggaggaagaccaggaggaggatgaatgcaggaccaccttgaacaagactatgatcagtcctccacaaactgctatgaaggtttctttttctattgagaagttatataagtacttacagtgagaagacctacacctaggcagtagtttaatctcaaactgtccagcaaggctgaaatggtcttttgtttcttagatttattttttataagaaagtataaaatttgattttttttttcctttgatctttctgggttatctttaaacaaccctttggatctattttaatggaaatttcccctctccaccccctgagcttgtgtgatatatttaagctgtacctttaaggtaatgtattctaactcatttccaactcataagccacagctgaggtcccttgacctgggcagccttgttttgcagactcggtcccatagcaattgtgcccatactcagatctcctgatttaaagcaagccccatgaattctgagcccttcagttttgatggttaaaagaaatgacctcttgtttgtaattgatttgccttcttggtttatatacatataaattagagtggtttttgaaatttgtttctttgtttttatggtaacctacgtctacagagtgcagaagaaataaactcaggtaaggacagcatctctcttcccaattttcattctttatataggaccagttttgattgattgtagctcccagacccttaaattattgcctttgagcttacaaacaacctgtgaacaaaaacctactgatcatcccattctgttactagtgatcagcgggaatgtccctgagaggtttttctttattttctcttggtcaaccttttgtaaactcaattcagttattctgtatcatccaatttaccctgttcaagggatccagatagtttctctgttgctcagctcagaagctcattatgctaaacggaacaaaaaaatctctcttcaaagaaaaactcttttaaaagacataattcaaatttgaagcacagtcatagccatcatgtgtaataatgcatcacacagattaccatttaatgtcaaatgaagaaaatgtcattttagttgcctcagaatggtgtgtgtgcgtgtgtgtgcctgtgtgcatatgcatacgtgtggctctaaagtaacacttcgaatttgagctaaagaactgattatagtatttggatttttctttttaatatctgaaattaccctgctgtcagaggccttcttggcatctgtggagaaggatgcaaaggaacgagccaagagaagaagggaaaacaaagtcttggcggatggtaattgtcagtccttacttttcaatggctgggatgatttgtgctagaaagagcacacgaaggcctgtatgctgacatttgaggacatctagattcccagtggtgaggtttgtgatgggcttgaggcagtgggacctggccagaaggaaatcattgatggtctgttctctgttcctgctgcaacaagcagagggtaggatacacctacctccagtgaaacctctttctgaagcttccctgtgcacttagcagagcaaagtgaattgtactaaacaatgctcaggaagtagtggggggtgagagtgagctgccactggctagcctaaggcatagatgaagaagtggaaaagaaaaataaaacagctgtgagataggagaggagacatcaaggaaaaggaagggatgggattgtgtatgttgcagggagatacatatgatagaagaatgttttcacttttattttataccacccagggctgtgtgtgctgcaggtctgaatgattccatatttgttgggaaaattaattatttgaccctctttatgagacaccgaatgcacagatttggtctctgtggcaagcttagtatggttctcagcctcaatgcagaaacatttactttttctgagaatctacttagaagacatgggtggatttggaggaaaaaaaatacttgaagaagctggtcctgaagtatctgcagaaaaaaacaagtgtcaagtccctttaggatcgatagaagtgaagaccttcgaaatagaattggaaaatcgggggaataaagtctgagagattttctgatgtgtggtgagagctcacctgtgtaacttatattcccatagccctaaaagaaaaagggaatgaagcatttgctgaaggcaattatgaaacagctatcctgcgctacagtgagggtttggagaagctgaaggacatgaaagtgctgtacaccaaccgagcccaggtcagtgaggcagggatgtatccatggggctttctcagggaatagttgccactaaacttgggaaaacaaagatgaggctagatgttgggctgggaaatgtttataagaactggctcttgttttaagtgtgggaggagctgacttatacacagcatttaccagtttccatgatgcaaatattctcaccatgatctaatttggaatcactgcaggaggacttgggaagagctgtccattatcagctctctccatagtataagtcagctccatcatatcactgatggtgaccatgcacttgtccctgtggataaaggagaaaactagtggaatgaaatgacctatgggaccttagaattctgctaccaacatatttcttcagcctccttttttggtactagtcttaactcctagcggatgcccacctgttagtttctcattcattgtatcagtctctctttaagattctgcgacagggataaagtggatagccaatggtcctggagccaatttcttggaaattttgggtttctgaaggtttttatgcattagtatatgtcacaaatgagctcaatttcctggaacaccaggtaaaaaccacccagatgtttatttactacttaatgaagggataggctgatagctctcaactgaaacaaaaccatcacctgtgaccttatctttgaaaagtagtttagtttttgtgtggtagagttctctgctggacaggcctgaaaaattggcagattcatggacatgattaccccatggtcagaatatgtcagcaggacctgtgtgaggtggacttgatgccctgtcatttgcaagagggagaggctcagcagagtcctcatcagctctaatttccctaactcgagtttaagaatgtctggctctgggatgttgaggaagaggactggaagcaagaaacaggacattcggaagccgaaacatatggggagtgacagtgacttaatgataaataaatccaagcagtataatctcactagtttagcaatttggatatgttagactagagttgaagtgtcatttaaactatcccaattttggagaaaacttgttataaggaagtgaatcggtaaaaaagatggccagaggttgatttagcagtacattgcattacccgaacaagattataaactttttgagggcaaaaactgccatatactttttcccctaatgctttatttatagcagatgttcaataaatccttttttagttacataacgttaaaagcacaataagtccaattaagggagttaagtttctgttgacaattcagaggcatcacttaaatgcaagcaattaatagaataattatagttccttcttatttattaccaaatttggtctctaaaaacatctgcctactgatgcttattcagttgtgttactctgaaattatttgaaagcaacaaaattgaattgctttaaaaaagttatataatttcagacatatctaattcagactgtctatactctgattcatctaaattatattttcactgcactcatttttaagcagcactttgattagttctgaagaatcacattaagaatgaatgtggataaatataaggaaatgtaatgaaaaggtttgagggagtgattcctctcagctttcccaaggagaaagcttatgcagagacaaaataatggacaatgtgctccctggtgttacaaaccgtttgaaccattgactatttttaaaatgcttcccctgtatgcatgcagtgtcagaaaacacttaataaggaccctgtaaattgagtgttgcttgctagagagaaaacctaacctttcattgctttgtttttcccctggagttaatgttatgatcaatagattgccggtataatttagataaatctggagtttaattgctgtttggaaaaagtagttcctttttaaaatgtgcaaaagcaaaagagattgaggaagttatagggtgtttaatccaagccttaagagagaaagaaaaaaaaaagtaaaaggctgtgtagagaaattgttggaacccataaagacttcttcagagtctgcatgtatcctaaataatagtgccatgaaatcatggccacagctgtctagaatgatgccagcttcctcttcacatcctctaattttcaaatgaaacctgagaccctggagaaaaggatgatgctttacagaacagatagctcaaagagtcgtcttctctaattagtacagaacatgagttaatgaaagcaccactcgcagcttccttgctatgggagccaagagcggcatgatttcaattcatttgctggctgttgcctactccctcctcacttgggttggatacttggattccctgtgagttgcaacattgaccccacaattggcttgtccatgtaagtatctcatgaggttcgttgttaagattgtgttgcagtgccctggtacagttttgatcatggacaatcctatgtgtagtactggctttattattggttgctgatggaaccctggaaaagccaccactcctggtgcttggctatcctttcgtacaaatgggatgatcgatgctgcctctcagggagctttccagaagaagagtgcttcagagttacttagtgcaatttgataagactttattgaccacttactgtgtccagtaattaatagagaggttatagtagccattgtgcttgtttatagtctttcatttgtttatattcctctagtccttagaaacattgaactaagttctcaatcagttcagtttgaatggatcacggaattctgagtcaattcttgattttcaagattttccccaattctaggggattctaaaagagtgccccaggcatttgatactaaggcttcatggtgatgctctgactctcatatgtcactctacttctttcattttttttttctgctgtgctcgggaggacagaagcagagctttattatcttttgataacagcgttattgagatataattcacataccatacagttcacccttttatagtacacaatttaatggaattttagtataatcacagagttgtgcaaccatcacaatcaatttttgaacatttcatcatcatcccccaaaaaagctccatcttcaactgtcaactcccccaatcctcccattactactcccagcccaagataatcaccaatctactttttgtctctatacctttgtctgttctggacattttatataaatgaaatcatacatttgtccttttatgactggcttctttcatttatcgtaatgcttttaagattcatccatgttatagtatgtatcaactcctcttcatttctttttattgctgaataattttccattgtgtggatataccatattttatgtatcccttcatcactgatggacatttggattgttgccttttgactatcatgaataattctgctatgaacattcatgtgtaagcatttgtatggatgtatatttatattcttctttggtatatacctaggagtaaaattactgggtcatatggtaacatatttaaccttctgaagaacttccaggctatcttccagatgggctgtgccattttaatgcccaccagcagtgtatgagagctctaattatctgtcttttttatcccctttatcatttggtgtttttctggaacattcacagcagggtagactccagaatccagctcttccttcttggatgtggctagtgagctgggtattttctctgtccctctagatccttccctgctttgtgccctggagggctgacctgtgtggactggctccttggcttcctagccctctagcttccatttgcattcagccaataaaatgagaaggaaggaggaaaagtgagattggggtatttattctcctggccttcggctctggtgaaggcctcagctcatgtcaggcagttcttttcgcagagctgtcctcccacattttgttcattgctccctccttctgccccttccattacagcagtggtaatggctgtccactgttgctagccctgcgattctgtagcatcccttgtcaggttccctaagccctgccttcaccgtggaagaggtccctgtattcaactctcctcagttgcccagtgcaagtgtgccatctgtttcctggcaggaccatgactgatccaggtaggggatagttctcgctgacattctactgttcgaatgttctttctgtgtgaactgaaaactgcctgatgcagaattgtgtgtgaatatcagctgttggtttcattacaggcttatatgaaacttgaggactatgagaaggcactggtggattgtgagtgggctctcaaggtaagagggtatttcttttcccacatgatagtgttgggctgaagtagatagaaggcagctgccagtgtatcaagataggaaagggtatagcctctgtagccagagcttcagtttcctcatctgtagaatgggatagaatagaattgttaggagggtcacgacaatgcacagaaagtgcctagttcctagaaagcaatccagggagctgctgctattgaagtttcaatgtcttattttacttcagctccttctttactattgtgttatcagacacttggttctatgtggtagtggaaatgcctccttctgtcttctagagccagccattggagcttatttctgcaatgctgttcttccttgtcagtttgtgttttttccctccagccctagtaatttggaaatataacatcctctatttgtagaggaataatcagaagaaagaattcctatttttcaactttagtcaggccttgagcagataaaataattctacacatggcatttcctctgaaatctgccaaaatagatggtcaaggatgcatagacataaagactattggtggaaatgttaagagttactaaaagagaaataatacgatcactttttagggacatgaccaaatatttaagtaacccttaatccacattcccctaaagtactctgtcacgggggttttaactaagtaaccaaaactagtgcttctcagacttctgcactatgctgctaacagcagaggagaatgaacatgagcccctcgagagggactagaagcagaaagcatgaaatttcttttaagatgtgtgttttacctgaaaaaccttgttaattttgcacagcacttcataaaacttatctttgttttgatataacagcatgattttcaataacttagaatcaagtaaaattgaggtaccaggagaatgtgccaggtttatcctgtggcttcaattcttgggtacagcacacctaccctagcctaatgagtatgtcccaaaacaagaggacacttccctagcagcatactggccatatctgctttatttcttattgagagggtaagcaaaggaaacagagatgaatgagaaagtcacctctgcttataatcattcataaaacactagggatcctctaacactgacatctggagtatccaatttctttatcccttagaagataaaatgtgtggcaaattttgtcccattgcacaggtatagtctttaagttataagagttgcccaaagctgatgacgtcaagctcctcacagctccatcatagatccactaacctgctttgtcgccttgcttgataatggtttatttttctaccattattctgcaggagaagagagaggcaaggatgttttccttggtttttccagtaataacagcaaacaacatcatttgctgcatgctcacgaaattctattctgttctgttcagtgtcactattttctctatttttctgacaaggaaatcaagcctcagtgattgattaagtaacttgtgcaggatcatgaagctagtgtctgtctaactctaagcccttgctcttaaacctctataaagggcctctccactgcaactttaaaccccgtaatccctgggtgtggatgtcattcccttctatggaagaaacacgatctcctcacaggttcaccaagagtatcttttctgatctgaaaaaggccaaaggggcagacataccatcatgctgattcaggataacaggctggcctgttcccaaatgttaattgaagtacaatgtaattaacggtgaaaccgaggccaagcaggcccaatggagctgacattaaaaaacactgacactcagcagccaatcttgttaaatgcccagcgaggctcccagttgaagagattgggtaaacacttggagaaatgagaaaaaaaaatgtacaaagagttctaaaaactaataatgatttgttttatgttgcagctgtgaattaaaagaaaagcttttgctctctttaaaattaatgtatcaatagtgaatgtcactggcactccattactaatagtattagtactttcatgccaatttaatctttttggacacttttaaattggtagagacaagcttatgtgatgatatttcaagactgatgtttcttgtcaaggaagataaggcagcaaagctggtttcaattaggaccagaatcatttctttctcagcagaacacttcttgcacaatgaaatacatcttcctctgaaggcaggattcctttaaagggaagctggggttcacccaagaaaattctcgtgagggtcgacacatgatcaaaggagagtgggcctattcgtgagaaaaatccattagtagccttttgcgtcattgtctgaggaaggcaaagtcacaactatctgcacttcacggtgacacacgataggctgggggacaaggctttaatgcttggggctcggtttcccccgcctgctgtaaccccggtgctctgccagtgaatgcactgtgaatatttggctttcatgagctgaagtgctagagtttcctcttttccctttgaccattcctttcctgcttcctcaattttatcctttgtgaattcatgaggggtcacccctctgctccccgtctttcgtctctctacagttactcccttacagctctcttctcctctcatgggctcaactctcatctctgcaaaaggctctcagacctacttccccagtctccccttccccagctccagggctgcatgtcagctgcctcctgcaggtgccttttgatagtcttgatgtcatctgaaactcagtatgtctagaagccaactcttcatcttctcactcagactttcccactccctgccctagctgacctctttccgttaatgacacaccatgtctttcaggtatctaggcccgtggttttgacttcacatcctccatatcccttatcattgatagttagttgatgctggtcagatctttctttgacatagctctggcatcctttccctcccactctcaccaggacttcagatattagcccttgttctaagtgattgttctggtctccttactcatctctcattgttcagcccaccatacctcttgttcagccattccctcctctgatcatgtctgcgtgccaccttcctaccagcttacctccacactgccattggtgactcaccctcctccagtgtggcatgcaaggctaccatatggtgttgccatttagctcaagatggggtctgctctccaccctgcacctgcccctcgatcccagctggaccgtccccggagccccctatactctcctcactcaggttcttgcccagcccactctccctccatcctcctctcttcacctctctgtgtcactaagactcagcccagatccctcctttgcatgcccttttaaagactgcattttagagaatattttcttccattgatttttttcagtagcattttctgtagcatttatatgcttttttctgtagcacctttctgaaggagatttggtgtcatttttaaacccttgagagtttaatggccagatttcaaattccagctcttccgcttgttatctgtgtgaccttgggcctctccaacccctagttttcacatctataagatagggataataactgtatctgcttcatagagttgttataaagcttctgtgagatcatccatatgaaccataaagctcagtgcctggcacatggtttgggctgaacaatcatgcacatttatttttattatgacttccattcacttagcagtgaattgagaaatgatatacacaaaagtgtatctctaaaagcttctccaacaattattgttctctcttttattattgttgttattcttctctcttttattattattgctcttttattaaatttagattttctcttttgctccgaaatgaattgctgctgatataactgcagcaatagcagctaatactctgttacccagagccacaccaagtgttttacataatttctttctcacaacaacctgagagagatactattattgtcttcattttctaggtcaggaaaatgagtgtcagaaaagttaggcggcctggccaacaacacgccacttctgctgagtagcagaacaaggatccaccccgggacattttagactcccgagcttgaactcttaacctcttcatatctaaacctttgaagggcatctgatttggcacaatgtcttgcatataaaagaagttcaataaatgttcatcaactggatgtcttagatttagcgtatgtctctgtcaaatcattccctgtggagttagaacaactaggggcaggcaggtgcagggcctcctgtgtaaatggtctagtttcagccataagtttcaatcctgccttttgaagggggcatccctactgatcttaagtaatatgaacagaaggtcccagtacacatgttgtggtttatttgggaggagggacttcccaggtccactaagatataatggtaacctcagctgttttcttagagtaagttctcttctcttctagtaaaccagtgactctcaaacttgcctgcacatttacctcacctagagagcttaaaaaattattgatgcctgggtcttatcccagagtataatgtaattgacatggggtgcagggccggcaggatttttacaagcatcctagatgattctaatgttctgccagtgttaagagctcttctaaactgagggtttgcttcctgattgcatctcattaaatggaaatgaaaactggcaggtatcattaattaatttggtgaagagcttgctgctgcatccaggctccttgcaggcatcaattagtttggtcacaaatgcataaaaaagttttgtcaactctggtagttgccctgagaatcaaagtttcgccttaactcttttagctgtatagtgaggggagtggctaatgacttcacatcttctaaaacttctgatcagtcattctcttttatgcagtgtgatgaaaaatgcacaaaagcatattttcacatgggaaaagccaacctggccctgaagaactacagtgtggtaagttcttagaggaatgtaattgacatgtttgatcacagactgatgctcccagttgtgctagaggagaaccatgattctccaagctgattaggtattaatccatcctttagtattttccaaggtaaagctcaagatcttaaagttgggaagaattttgggtgtcagttagttcaactccaccagctgtaggactctcttctgcaacatcctctaccagtgtttgttcagtctgtggagagaaaagacctgagcaaaaagagaaaacaaaatttgctgtaacctcatcacccaaaagtaaccatgcagatcagtcaacctgtctatctacctatttatccatgctaagatattatatatcgttaaaagtagctttattgagatataattcacataccacacaattcatctgtagaatatactaaaaactatatgattcaatagtttttagtatattcacagagtcaggcagccatcaccacaatcaattttaaaaaattttcatcccttcctaggaaaaccccatacccattagtagtcagtccccttcccccaaccccatctcaacgttaggcaaccatcagtctttctgtctctatacatttgcccgttctgtagattccatatagagtcatacgatctgtggtcttttgtaactgaggttgttcacttagtataatgtttgcctggtacatttttgttgtagtgtgtatcagttcttcattcctttttattgctgaataatattccattgtttgataccatattttatttatttattcatcagttaatggacatttgggttgtttccactttttgcctgctatgaataacactgctatgaacattcatgtgcagggttttcttttttatgtttacagtcctcttgggtatatatctagaagtggaatagcagggccgtatggtaactctatgtttaaccttttgaggaactaccaaactgtttttgaaaatggctgcagaattttacattcctaccagtagtgtatgagggttccagtttttccacatcctcttcaatacttgttacttatttttttattatagctattctagtgggtgtgaagtgatatgtcattgtggtatttgatctgcatttttttggtgactaatgatgttgaggatcttttcatgtacttgttggccatttatatattttctctggagaaatatcttcttttataatgaggtgtaaatgttatttatatattctgaatacaagtttcttatcagatacatgatttccaaatattttcttccactccttgtattgccttttcattttcttgatgatgttctttgcggcacaaaaatgtttaagtttgataaagcctcaattacctatttttctttggttgcttgtgattttggtgttatatctaagaaaagatcatctaatccaaggtcaggaagatgtatacctatattttcttctaaaagttttatggctttagctcttaaatttagctatctccaatccattttgagttcattttttgtatgatgtgaggtaagggttcaacttcattcttttgcctgtagatgtctacttgtcccattaccattgagtgattttggcacccttgtcaaaaatcaattgaccataaatatatgggtttatttttggacttacagttttattccattgatctacatgtctgtccttgtgccagtaccacagtgtcttcatttttgtagctttgtattaagttgagaagtgagagccttcaactttgttcctctactttttcaagattgttttaactattctggtgctctcaaatttctatatgaacttcaagattatcgtgtcgatttttgcaaagaaaccaggtggaattttgatgggtattacatgaattcataaatcaatttggcaagtactgctatctaaacaatattaagtcctcctatccatgaacataggatgtcttcccatttataagatatgtctttaaaataaattgcttcatattgtacattttttaaaagtttgttggactttaattgtaaatgtaatacaggcttattgtaataaagccaaataaaagaaatgtgaataaagaaaatgttaatctttccctgtccaccaatttttatttactcattcaattcattcattcagcagatatttattgcatgctttctatgtgtcagacactgttaatacaggcaataaagaatacatcagtgaaactagacaaagtccttggcttcatggaactcatgttcttggggtaagggtgaccaggagacaaaaaacaatcaaatagatgtgtagtgtgttacatgtactatgttaggtagtggtaagtagcattgagaaaaatcaggaagcagtaaagatgagactggttttatatagaggggtaagaaaaggctttctaaaggaatggagggagtgacgtgagcaaaccatgtggatatataagggaataagttcctggtggagggatagctagaatgcagccagcaagaggagagcaacaggagatgaggtcaaacaggtgataagggtagagaaggggctgatcctatagggccctacaggcttttcaaaggactttggcttttactttgagtgatcttcaagctttattgaaggattttgagtaaaggaattaaatgatctgacatattttaaaggattactctgactgccatgccgagcatgtgttttggcatggtaagataagaacagagaatgagtgataaggctattgcaataaatatccaagcaagaggtggtgatggggaccaggttggtggtgatggaggtggtaagaagtggtgggatttgggatatttactgacagtgaagccaacaaaaattgttgctagattagatctagggttgaagagaagttggatacagggtcactctgatatatagacttctgttcctgcgacactgttctctactttaatgtgttattgttttccttcagtttgtttcttaactctagtcttctagatgaaccttgaaccttcaagattatctcagaactgttttgttgttgttgttgttgttgttgttgttttctgagcgttttctctaggtgactagttagattatactctgggcagttcttatattcttgtgagaaatactgccctaagcccaggaatcctatgaactagaatcttcctttttctggtaactttctatctagcagtttcctcaatgagaagccctcactcttgagttttccagctgactcttatgtggccaataaatggatcccttaccggttctcttcgcagcttgtacatttaactaggcagttctcttttcctgttcccaagtctctgtcaacattgcctctagcttcatttatttcctaactccatatggacatatttgacagcctcctttctcagtgcaaatatcatatctaagttttgcgtttactttatgattatttctatcccagacagacatgatccacaagaatttaggactggatatttttcatcatgagcatctaaaattctttaaaactaattttgaaataattcctgttgccccctagaactggagacgcctgaacaaaaatgtcaaatgcacattgtgttcctatgcctgtctcctgcactgggagcaggaggaggtgaggagaaaataatgaagcagccaagcccaatgacacccagtgtctttctcataatcacctttaccccaaccactcttcaaggtcttgtttcttttttccagtctagagagtgttataagaagatcttagaaataaaccccaagctgcaaacccaggtgaaaggtgagcacgttcctgctgaggtccttcatctgaactccacctccctctgccccctgccttagaatgccttccgtgctttcactgcccttggccactaggcagcggcggatcctctttcctgcacagttgggtcctctgtgttaaccagcccactctgctcctctgtttgctgtgctcccttgcaaatagtaatattttccttcttcattttctacaccatcctcccttagacacttttagactcccttgaatccccaacaaggtttaagattctggttgtagatttagactgtttctaaaattttccttgctaacgaagagttttaattattttaatgctttatgcttctcaaactcccatcctcaaaagaaaggaaaaaaaaaggttgcttcttgtgtggtattgttgattgttagggttttgttttgctttcctttcttgtttttctaggttacctgaatcaagtagatcttcaggaaaaagcagaccttcaagaaaaggaagcccacgaactgctggattcaggaaagaacacagccgtgaccaccaagaacctcctggagaccctttccaagcctgaccagatccccttgttctatgctggggggattgagatcctgactgaaatgataaatgagtgtaagccagagatgtgtgtgatctcatgagtgctgtcagtgtgaagggacacattcagaggtctgcctttaccaggccaagaatccctcccttccttccacaaatattgattaaagatatacgctaatgtagctgctaaaaggggtgcacaagaaatgtcctccgacttctgctccatcctctctacagagcatgcgtacactcagcacacatgcaataaacatacacaacacaacacgtacacgtggcacacactcgatatatacttacatacaccacacatgcactcagctttcactcacttgaatatatccttgtattacacacacaccacataccacacacagcacactcacaccataagtactcatgtcagtccacatatcctgcgcacactccaccctcacattttcaccacacaccccatgcacatcctgcgtgtactccacacatacccccacagacacctcaagcatcccataccacctcgtacaccttccctccactgtggaggaatggaagacagaattttgtaggttaaactgtaaggttcacccagttacagttaatggctgcataggatgtgaaaatggtttcagagcaaacatcagctctcctactaatgagggccatactgttctcttttactagctcttgtaaacattgttaccaaggcttaaataatctctatactcagtgacagcatgttgtttgtacaaatagatggagtgtctgacttctctttagtgtacaatggagggcacacaaatatccccttcagcagtttcttggagattataaattcctctctggagcttggaaatagctttgaaataaatatttaagaacagatggatatgctggtacttcccataggttaagcagctctgggaggctctctgaagattacagaatgatgagctgtgcagatagccctcggggccaccccagctctgctctccttctctaaacagtccctccgcctgagaggcactgaggcctctgacgctgagaggctgctgaccattgtatgtttcaaaatgtaaagttcatttgttcctgccaaaccattcacgtgggtaccgtggcattccatattaggtttctcattagcaggtggctgtgttgcagcgagacaccagccagccagtttgggagtctgaagtggttttctttgtatctgtttcaggcacagaacaaactttattcagaatgcacaatggatttagtatcatcagtgacaacgaggtcataagaaggtagggatgttcatagagacagcccagcagcaaagcaagggaagataaccactgcttatgaaatcagacacgaggcacatagacagtcacgtttctgaacattaccccccttcagtcagtagtggggggctctccaggagtgcaaagctactccacgaacatctttgagtgctttccctcaagacattggagttacactgcagctaacaattgaggctgggcgcggtggctcatgccagtaatcccagcattttgggaggtcaaggcgggcggatcacttgaggtcaggagtttgagaccagcctggccaacatggtgaaaccccgactccactaaaaatacaaaaattagctgggcatggtggcaggcacctgtaatcccagctgctcaggaggctgaggcacgagaatcgcttgaatctgagaggcggaggttgcagtgagccgagatcacgccactgtactccagcctaggcgatacaaccagattcagtctcaaaaaaaggaaacaattgaagagagaggaacagcagcacttcccagggctcctctaagctcttcaaagtcagagaaatgatcattcttgctgctttcccaccagtttttgccaggttgtcatttgttcatttcttcttttggaatttgctgatcatatcaagaagtgatataaatataaatgggccaatcccatttataatttcatctgaagaaagacctgtatggtaggatgcagtttgctaaagtgactgtattttcatttcagttgttctggtgtgcttcctgaggcttaggatacccgtgtgggttggagtcaccagtacatgtctgtgtgctcagccacagttcattggtcccagtgcagccatcgcccatggccctggctcactgcccagcctctgtgcagccctggcttcctcagtctgcatccgtggcctgggactcatggttccgtgattgatcctggtgacccatggctctggattataaaactatactttctcaaacctgtatttggtgaatctaggggtgaaataaaaccaaatggaaaagaaaatcaagactgattttcagacttttaagatagctctcctttgtccattctaggtgtttttccacagcaggaaatgatgcagttgaagaaatggtctgtgtgtctgttctcaagctctggcaagcagtgtgcagcaggaacggtaagcctgggtaatcaccgttgatcaccattaatgcgctgcgtgcaggaactacgctgttgggtggactgtcctccccaaaggccaggccctggaaagctgatgtctagacttccgcacacacccactccctccaggaaagcttatggatcaaaagcaaggtagacagatgaggagcaaggttggggtgaagggaggaggttgtcagcataatgagtggtctcctctctcctctcctcctgctctttgcagactcatgacttctgttcatgcactggcaatgaggtagatggagtttttcttttcttgtcagcctaaaatattgttcctttttgctaaccacagtacctttccagcatcctgagatttacagtcatccctgccaatatcttcagacactgattagcatctagtattgagacagtagaatgccatgggcattttatttactgtgctaactcttaggcttttcaaatatttgcatcttccagagttcattacgtttttgtataatctttcttaatcacttttgtaacttcaacataaatacaaattttacttacttctgtcatttttaaaaagtgtgtttcataggaaaaagtttgaccctggacagaaacactgaaaatggggataatgatagctatgtctccttttcacagggctactgtggggagccagcaatagagcttgtgaatgcagtttgcatactctgagatgttaagtaggagataatacctttttttttcttctttagtagagtagaggaatcaagaacttaagaaattaagctcttgaaaatctagacaatacaaaatcagggggcctatttcctgacaagaattaaggggagttatgcccagactactgtcatcatcaaggtgcctttctactctgtgtaagaccctgcaccagcttagggcagtgtttttgcaaactcccctacaggagggcgaggaaggcaggacttggcaatggtatgtctactcagtgtgaatctgacataacaatctgtttactctttctgtgaacctatttatcgtttctgtgaaccttaaagttacatttttttatcatctgaaaaatattttcagatacctgtgatgtaaatgctgtatcacaggtcaataaaatcttgatatatctaactcaataaatgcaaagcagtttttcagaagggcaagggaatgcttaaaagtaaggacatgaaaatatgtcagtcatctattgtggagttgagaagagaagccaattacagggtaggatgtataatattttacacattatttatatgaggggtgaataatagctcctttggggaatgggcttacccggagggggtatcaactaactctgtgttgtttgaattatttatatcaaggtacttttctagtataagaacaaaatatataatcaacaaggacctttccatttcagaaatcagtagatcctatcttacgtggacaagagtaattataggtgaagtataggattgagatgtaatgtttgcaacgaaaacatggtttgatatgtgggctacacataggatcctgtagtcctgttactctggctctttcagggctagaagagacctggtgtgtgtcttctactggatgccgtgtgctgtgtgtaaatgggtaatcagtacaggagggaagaaagccaagggtgatgaggtccaagtgatggggcccacccctttgagatccagtttgctctgtttcctagcttagcctcatactgcagtctgtaccctgcagtttcaaacaaattcatgtacctggtcagaaaatgaaccagactgccaccaccctggaagagcttatgttctaggaaggagggcacactttattcgttagtgctctcatgtgatattctagttttctggataacatttcctcagatgactactctagccgttgtatgaatattgatggcctaaagacgttccacaattaaactgatttatttccctttgctagtgtttccagataccacacaccaaggaagtttgacaataatgacacagttgatttatgggtgccagtccctgtctggcacagtcatgtactaacttatttaatcctcatgatgtccctgtaggtaggaacgtaatcctcattttactgatgaggagaccgaggagcacaagagttcattggtaaggtcgctcccctgggcattcggacccagcagtctggttctagaatccacactcttacacttcattattctgccttcaaatgagtgggcaccagttgagtttcccattaggatagagggtgacagagctagtttaattgccatgatggcatgcacaagacacacaacctctgtgttttgcagaggaaaaccagcgtgtgctagtgatacaccatgacagggccaggctgttggccgccctcttgtcctccaaggtcctggccatccggcagcagagctttgccctgctgctgcatctcgcccagactgagagcggacggagcctgatcatcaaccaccttgacctgaccaggtaagcctctgctggcaggatcttcctgggacatctcatgtcatcacttgacaagttcaggcatgcctgtctcccctcctatctctgttgtgtgacttgaaggatcaataacagaaagagcctttgacaagagtgctctgtcatgaggacctctgggacagactcctgtccgaacttggtaccatggatggtttcacttctcctgagcaactggctcgtccccatcccacaaatggtgcaaatggcagtgcttccgtagccagatcaggagccccaccttaaaataggtcacttgcttctccgtctttggcctcggtcctatctctaccctgttcctgccattcgttttcttctttcattcttatttgaggtaatcctgtcttattctacgtgtccttaaaccctttgtggaacaagatggagtatgaataaataaaacatttcaaatactgttgcatggaggtctttccaaagtgtaagactatgggcatagaatgtgtgtaccctaagtagactttctagaaagattactgaaccacagtgattctgccccgtcctttataatttattagtttattttttaaatcatttatttatttgttattttgctcacttgttttacgtatttatttacttttatcttactaagttttcagtttatttatctttacatgattagtttgaacatatgaaattgccacttattagatctaaaaggttgcatgccagccattttatgtggttcaatctaacagaaatagtggcaattattgtagcttgctttataaatgtttctcacacaatctaaaaacaggagatgacccttctgagttttttcattcactgctattttgttttatctcccctcatcctgcggggtaggcaaggtaagctttattacctcatgtcactcatggggcaggaagaactgcagcaaggaaccaagggaatctcacccaactaggctggcccccaggtactgttctgaggacccagctccgctctgtgttcccagtgggaaaaggagccaaacctgctacaactggctcctgttccttccagatctttttgggaccctgctgagccctcccacactgtccaatttggtatgtaggtccatgtgtgccgtgacaggatggttattaagccttgcctacggctccccttccaggcccagtcgcagcctcagtggctcccaggaaaggctttggcaacccactgaagctcagcctgcacggcagatgcagattgttagtggagttcaattccccaaaagcacatttcacatttcaaatgactctgcagtcatttcctcgataccttcatcgtatttttttaatattgtttttgtctctttgagtaaatgtagctatagctatcatgagcttttcccctcaagctatctttgaattgcttgagcttcaatgtgcatttttccagtgtctcggagagtggcgttcatgatcacctcgggtggtcctgcctactctctctaagatagtcagagaaacctcagctttttacttttatgcccactagcctccttaacgttcatctccagttgaaccagacagaatgggttctctgtgatgaaacgaggcagtttgaagcaagacagggctgctgcacatagccccttgaccgtcacggcagcacacgtatcacattcctcccacaatgtttatcctcagagaagaggttgaaggcatgaatgtgtgctggccaagggccagtgtcattttgtaaaaagtgctgggttttagtcttaagcgtactgagtttcaattccctgcatgtctctgcttgtgtgacccaggaaagttatttagcatggacaggccccggcatctcatctgcatcactcacttatgatgacacggggggtgatgcagttgaattttttctgctgcattgtgcagaatacttgagcaaaaggagcttaagcaaaataaagcctggcttgttttgtcacctaataaaatgagactaaagatagcagctattggtgcggtggcttaaagacgtcgaggtccaagtctctgcccttctcttgaccttcctcacatggtcataccttccctcttgctgcaactccaagcttcacatccttctttaagacaggtcaataccagctggatcggtcccttttatcaagaaaacctactgcctatttctctttggacagaattgtgtcacatgctacccctagtggaaaaaaaatggtcccaacttcttctgtagtagagttaggaagaatagaagggaatggagaatatctgtgaggttagccagcaaacagcatctgctacagaaaaaaaaaaaaaaaaagcaactaacatcaattaagcctgacacatggtatgataagggctcaataatatttttataatcattttctcttagggtatattgtttagggtcctaaactgaagtaaccttgcatttattagttacatgaaagcattttctcacctgtggttcactcacagagacagctgcttatcagcagagcagaaaatctgccaccaaaaaagagggtatgtgaggaaatagaaagggacacaccgtcctctctaggtgctgagtccagttaggatgtgtgcattgtcacatagtgagggggcctagctgcttatgtctgccaggacaaagccaagatggtcttagactgttgtctcatctgtgctattcaggttcattagcagtcatcttcaagaccgaagaaaataggtttaaattggtgaaggatgaatctgaactaactgtaaaacaaataaattatttttgacagcaggagcactggaatccattcctgaagatgttagggatttgcagaagcttggcgtcacctgggcccttagaaaccatccagtcaagccccactcagcatagatgtcctctgcgtacccccatacagcctgtgcatggtgccctccaggggagatgccagcagttttcattatttttaatctccatttgattcgggatgggcactaacgcagctaatagactgagtggaggaagtctttccccaattagcgagaggctgtggatctcacctcccaaggtagccaactgtccatttcaagacagttctgattgagataaattatctccttacactgtgcacaagttgcctgccccgtactattctggggctgattctgcctccatacactgaggcccaggcccagactcctcccagctttccagtactttagatatctgaaaatactgatatattccaggttaagcatccttgttacctccatcattcctttgatgatttggcctccagaccactcctagaataagtggctaaatagatccagcaccatagatgtgggtgactggaattcatattcccaaaagcccaatctgatggcctgtcatctgtctttcttaaagatgtcaaggtcaaagtccctgcccttctctgccctgtggcatttggtcctattgatcactactcttctggaaactccatcacagtgattgtcaggacaccatccttcctggcccctctcctacctcctggctattcctttgtggtttcctttgcaagcccccctatgctatcacccttccaagtcagggaccccaggatcctacccttggccctcttcccatccatggctttcgtcaagaggcaaagggtgtaagtctcactctgttgagtgtgagatgaaaacgcccttctgccactggacatctctatcacaacatccacaagtatcatcgacttaataaatcaaaattgggtcttcacaccagttcatctacctgaatttcctgtcttcacagagggtatctccacctatccagtcgcctaagccaatgtcctggaagtgacctggctctccctcaccacatccataagatagtatgctgccagctctttctccttagcatctcctgaattcattttcttctagttctcctctactgtctccaatcatttcttccaggtcttcatgagtgtctctttgtgtttttactgtacctcttactctgctgctgcctcagtctggtcccttagcctttattatctggacaatcacagttctcccctggttgaattcctgcctcttgtactacctgctccaatccagcctccaccatacactgaagggatttttctaaaatgcacatctgttctgctattttcctacttaacacactgaaatgactattccttgtaaggctggttctccaattactgagaaatataatggctaggaatcacatgaggactttataaaaaagcagcctcctggagcttcctcccactcagagtaactgaggaatctgtcccagagacccccaccaccaaccacacattggagaacaggggccaacagggcaaagtacagactttccagcaggccctagaaggcccccaggatctgggctctgtccagctctctaccatcccctgttctcccctcacatcctaagcattaactgcatgccagcagtccccaaatgtgctcctgcaattctatgcccacatagtctgtgactacaggctgctttgcctgacatgcctctgtacccatccctgtgggcccgacactggcctgcaagctgcctggagccaggacattgtcttgtttcatcattatgacctcagaactgaccacattgcctggtacacagtcagtgcttgttcattgtgattggtcaaatggataaacgaatgaatagctaacactacacttcaagagacactgaagtgtcatctattgaaggcttcttcacttccatgcccacaccttccaccagtgagactctggtcccctcaacatgtgtctgtctctgacatatcacctaagacagtttatcttatttatttacatgtgtatcactgtaggagaccaggagctcagtactgagcacagtatacttagcaccttatagatgcttaatgcaagtttgctggatgaacaaattactcttacttccattgtcatggtgccagtaagtccgtttgggcagcctgagatttcatcaggtgttttttggcatctgtgttagactgtttgctcattttgtgtttgtaagtggctaaaaatccttaaatctttctcataggaaccagttataaaccaggtctcacaattctgttacttaagcagaatttccagctctaagtggaggactttgagcttaaccctattaaatttaatctaatatattcagcagcctgtcacaatcttgttaaatctttattccgtcacccaccttattagggggccctcccactttagtcatcagcagattagtaagcatgccatttagatgtcatctaagttaatgaacctgactgagccagagtcacatggcagagtcacagaaactccttctgagctggcgtccgataatcaataaactttggttaaaagtattcagcattctggggattcacattaagtggtggagccaaccacttaagagtatctgtctctgggtgggcaaggagctaggcttcctaggagggcatgacaaggcaccctttctgcttatttcacccggatgctgactccttttttggtttccttgcaaggttaccctgttgggatgttgttagttggaggacagctacctctgaggttattatggttttttgcagattattggaagcgctggtgtcatttcttgatttctcggataaggaggccaacactgctatgggactgttcacagacttggctctggaagaaaggtaatttttttatttatagaaattgacatttcttcttcagtctttgttgaactgtctgatctttaaaaatgtgctgtattcagagaggctaggccaagtctccaagtgagtattgcaagattcactgagtaggagggctgatgcctcccagggggctgcagccacccactcccattctagtcactctgcatagaggctgacccgggcctccatgggtttggaagcagcagcatacttaaagcagtgcctctcacagtaggcaagcctcccaagtgtcaggaaccttcctccctcctaatcagtgcctggtacataggagctgcccagcaaatttgcgttgaatgaacctgagcgagccagcgagccagcaagcaagaatgaacagtcaactgcagcctcctctggggttgccagtgacattatgagtaatgacctccttctgccccatggctttgtgttgttttgttttgttttgtctagctgctggggatgatagtaagggtcttagttttcataatttttcagttgcttttttttaaagtgcatcttgtgttttaaatttcctcacaaattttaggacaccttgcttagagatgataataggatgagagagctcacaggcaggccagccagctggcacgggccggggtatggaacagtggccatagagtgtggagatgcgcatgcatccaggccctcccagtggctccgatgggtaaacatgcttgcatggtatttgccttccgcaccgcacacacacgctgtagactcagagcaggggttgggggtaagtcagcttggcagaagcctagagattccagtagctcctgcttaagggagccaccatctgagatctgttgtttaacatcaaaggcaattctccagactcagaaaaattagagccacattacatacacagtgacatgcttttttctttttttggttctgaattgtccatgcacactctaaatcatatggacctagagtttgcaacattaactatctgagacactgtatttatgttatagtttatgcaatgtaaaaataaatcctggctgatggtttctcaacagattccaagtctggttccaggccaaccttccaggtgttctccctgcactcacaggcgttctggtgagcaaactgtcattttcatcctctgtaacagacactctcaggagcgtgaatggggctgtttaaacacaatttacaatccagaacaactattgtctctcggttgattagtcatttattcacagctggaatttacacaattctcagttattgaaacagctacaggagggacaggtggaggtggcatatggatggcgctggttacaggggaggaaaagctggatatgggtggcatcttaagtgaaggtggatagagttcgtcagtctccatcagtcccctgctgacactaagtacgacgtgcaaccctattcccagatggaagtcatcctgtcaggaagaccagtgtagcaatttgagctgataaggcagtgaatagtgtggggggcagggcttctccttggagagtgtgttgcaactggagcctatcccttatgaaccttagaagtttcaggggcccttagagagcataaccacacctcagtatgtcacagctatggaaatggagcctctgagaagggaagggatttgcccaggtccctccagctggttggtggaggagctgggattaagccctaggccaagacccttttgggtttacccctctatgtgcctccatccgttgccagtgagaccccagggatgcccctgtgtgacatgaagctatctggttggttcgtgggccttttggtgagtgagggatgcacctagagatcatgcggcatcctttgcctgctctctgaggctctgccttctctcaattctcatttagaagacagatcccaaggtaagcagctcctcggctctgtgccagtgcattgccatcatgggaaacctcagtgctgagcccactacccgaagacacatggcggcctgtgaggaatttggggatggctgcttgagcctcctggtatgttagcttttctattcaaaattggtctttatcctctttgggggcattagcgtcttcttagttatctgacttttccaaaaattctgtttctgtgggtgttggatggcgccagttggcttatcccttctgtaaccacggattttatgcactgctggccttaaagagccctgcagatcaagtctcatttgccctggggagatttgaaggattttttttaatttttaaaaattatttatttatttatttatttattatttaacttttaaattcaggggtacatgtctaggtttcttatataagtaaacttgtgtcatgggggtttgttgtacagattatttcgttacccaggtattaagcctagtacctattatttatttttcctcatcctctcccccttcctcccttctggcaggccccagtgtgtgttgttcccctctatatgaccacgtgttctcatcttttagctcccacttacaaggaagaacatgtggcacttagtgttctgttcctgcattaatctgcaaaggataatagcctctagctccacccatgtttctgcaaaggacataatctctttcttttttatggctctgtggtattccgtggtgtatatgtaccacattttctttatccagtctatcattgatgggcatttaggttgattccatgtctttgctattgtgaatagtgctgcagtgaacatatatgtgcatgtgtccttataataaaaagatttctattcctttgggtatatacccattaatgggattgctgggtcaaatggtatctctgtgtcaaatggtatctctgttttaggtctttgaggaatagccacactgtcttccacaatggttgaactacttcacactccgaccaacagtgtataagtgtacctttttctctacagccttgccagcatctgttattttttgactttttaataattgccattctgacttgtgtgagatggtatcttgtggttttgatttgcatttcactaatgatatcagtgatattgagctttttttcatgtgcttattggccatatgtatgtcttttgaaaagtgtctcttcatgtcctttgcccactttttaatggggtagtttatttttctcttgtaaatttttttaagttctttatagatgctggatattagacccttgtcagatgcatagtttgcaaaaactttctcccattctataggttgtctgttcactctgttgataatttcctttgctgtgcagaagctctttaattagatctcatttgtcagtttttgctttggttgcgattgcttttggtgtctttgtcatgaaatctttgctcgttcctgtgtgtagaatggtattgcctaggttatcttccagggtttttatagttttggattttacatttaagtctttattccatcttgagttaatatttgtatattgtgaaaggaaggggtccagtttcaatcttctgcatatgactagccagtttccccagcatcatttattgaatagggaatcctttccccattgcttgtttttatcaggtttattgaagatcagatagttttaggtatgcggtcttatttctgcgttctttattctgttccattggtccatgtgtctgtttttataccagtaccatgtgttttggttactgtagccctgtagtatagtttgaagtcaggtaacgtgatgcctccagctttgttctttttgcttaggattgccttggctattcaggcttctttttggttccatacgaattttaaaatagttttttctagttctgtgaagaatgtcaatggtagtttagtaggaattgcattgaatctatatattactttaggcagtatggccattttaacaatattgattcttcctgtccatgagcacagaatgtttttccatttgtttgtgttatctctgatttctttgaactgtgttttgtagttcttcttgtggagatctctttcactttcctggttagctctattcctaagtattttcttttggtggcaattataaatgagattgcgtttctcatttggctcttggtttgactgatgttggtgtataagaatgctagtgacttttatatgttgattttgtatcctgagacattgctgaagttgttaattagcttcaggagcttttgggccaagactgtgattttttctagatacaggatcatgtcgtctacaaacagaggtagtttgactttttctcttcctatatagatgccctttattttctctcttgcctgattgccatggccaggacttctaatgctatgttgaataggagtggtgggagagggcatccttatcttgtgctggttttcaaggggagtgcttccagcttttgcccatttagtatgatgttggccatgggtctgtcatagatggctcttattactttgaggtatattcctttagtatgtagtttattgagagtttttaacatgaagaggtgttgaattttatcaaaagccttttctgtatctattgagataatcacatggtttttgttcttagttctatttgtgatgaatcacatttatctatttgtgtatgttgaaccaaccttgcatcccagagatagtctacatcattgtgatggatgagctttttgatgtgctgctagattcagtttgccagtattttgttgaggatatttgcatgaatcttaatcaaggatactggcctgaagttttctgttttgtgtgtgtctctgccaggtttgggaatcaggatgatgctggtctcacagaatgagttaggaaggagtccctcttccttgatattttggaatagttttagcaggaatagtaccacttcttctttgtacatctggtagaaatcagctgtgaatctagctggtcctgggctttttttgattggtaggctctttattactgacttaatttcagagctcattattggtttgttcagggattcaatttttttcctggttcagcctttggatggtgtatgtgtccagaaatttattcatttcttctagattttctagtttatgtgcatagaggtgttcataatattctctgatggttgtttgtatttctgtggggtcagtggtgatatcccccctgttgtttctgattgtgtctatttgcatattctctctttccttcttttttagtctaactaatggtctattttattaatttttcaagaaaccagctttaggatttattgatcttttgaataggtttttatgtctcagtctccttcagttcagctctgattttggttatttcttgtcttctgctagctttgggatttgtttgctcttagttctctagttgctttagttgtggtggtaggttgttaacatgagatatttctaactttttagttagaaatatctgttagggcatttagtgctatagatttccctcttaacactaccttacctatgtcccagagattctggtatgttgtatctttgttcacattagttttaaagaacttcttgatttctgccttaattggtttatttgccctaaagtgattctggatcaagttattcaatttccatttaattatatagttttgagttcatttcttagtcttaatttccaaattgagtgttaagatttcagttattttgcatttgctaaggactattttacttccaaatatgattgattttagagtatgcactatgtggcgatgagaaaaatgtatgttctgttgttttcatttggagaaatctgtgtatgtacatcaggcccatttgatccagtgctaagttcaggtcctgagtatctttgttgattttctatctcagtgatctgatattgtcagtggggtgataaagtctcctgctattattgtgtgtcagactaagtctctttgaaggtctctaagaacttgctttatgaatctggatgtttctgtgtttggtgcataaatatttaggatagttagatcttcttgttgaactgaaccctttaccaatatgtgtaatcccttctttgtcttttttggtctttgttggtttaaagcctgtttcatctaaaactaggattgcaacgcctgctttttttctgttttccatttgcttagtagatttttctccatcctgttattttgcctatgtgtgtcattgcttgttggatgggtctcttgaagacagcataccagtggatcgtggttctttgtccagcttgccactctgtgtcttgggacatttggctcaatttggctcatttacattcaaggttagtattgctatgtgtggatttgatcccatcatcgtgatattagatggttattttgctgacttatttatgtggttgctttatagtaatgctggtctgtgtacttcagtgtgtgtttgtagaagctggtaatggtctttcctttccatatttagtgctttcttcaggagctctggtatgacaggtctggtgataatgaatttcctcaccatttgcttatttctcctttacttatgaagtttaatttggccagaaatgaaattctgggttggaatttattttctataatgatgttgaatattggcctccagtctcttctgggttgtagagtttctgctgagaggtctgctgttagtctgatgggctttcctttgtaagtgacctgacctttctctctagttgcctttaatattttttctttcattttgaccttggagaatttgatgattatgtgtcttgggggtgatcttatgaagtatcttactggggttctctgcatttcctgaatttgaatgttggcctctctagctaggttggggaagttctcatggatgatatcctgaaatatgttttccaaattggttccattctcctcatctctttcagggacaccgattagatgtagattggggctctttacataattctatattcctcagaggtttttctcattcctttttattctttttttatctattcttgtctgactgtcttatttcagaaagcctgtgttcaagctctgagattatttcctctgatgggtctattctggtattaacacttgtgattacattatgaaattcttgtagtgtggtttttcagctctatcaggttggttatgttcttttctgtactgaccattttctctgtcagctccttcattgtttcattatgatttttggctttcttggtgtgggtttcaacgtactcctgtagctcaatgaacttcattcctattcatattctgaattctatttgtgtcatttcagccatgtcagcctggtttagacccctttctggaggggtgttatggttgtttggaggaaagaaggcattctggctttttgaattatcaggtttatcatgtggattctttcttatctttgttgatttctctactgtcaatctttgagattgctgacctttggataaattttttttcttttatcttatttgacgaccttgagggttttattgtggtataaggtggcttcagctgactggctttatttctagaagattttaggaggtcaatattcagctcccaacttctggactggatgctctaactctgagggacttgtattgggcctcaactttgttttctggcttctctaggttaagaatacactttactgggggagccaaggtgatcccgaacctctggtcactacactccaatgggtgttgttagcccaagaatttcataatgtggtgacaatgggaccttaacttgttcactcatgccaacagcagcagaagacctgtggcagagtgctagcaggtgtcagggtgcctgcctccctgcgggtgtttgccacaatggcagaggcaacgcagctgggggagagggtccctgctgatgactgtgtgtgtggtcatgctgaagattgtgccttctctgtgcctcacaagcagaggaggttgctcctagggggagaaggatctgctatactctatgccatgctagcacaagggcaaggggaaggtgctggtaggggtggggctagctgtgcccatcaagactccatctgcaatggtgatcagtgggaagaggaggggcaggactgcactcccgtgctctggcagggcaaggaaagcaaaacctgcctgatcagacactcaccagcaaagtgatgtggggagttgccctgggcccaggggaagctgcagtgtggggagggagcatgtgggctggtgcatggtgatggggtactctgctggtgctctccactggtcaggcatggtctgccagtgcagaagctatggtgtgggcccccagagcccccaagactgctcagcaagcaggtgtggcctggctggggccccaggagaggccagcagagcaaggggtcctcaagttggactggccctgtttgatgggcaagaccaccctgcagagttcaggtctgatgattccccgagggctaaagtctcctgtgggagcaagttgagcctagtggggatggctgtccctggccattctccactacagacacttctacgcccaaccctctgggctccacatcaactggcttgccacccctaccacttctctaagcagctctccctgacaactcgatgagtgtctgtgctggtcaaggggatttctcctgccagggttccagaggcctatgatgagatcaggttgctctttgccagttcaactcacccattccccaagagcctttggggaccaagaacaagccttggtacataggcttgcatgcagcattcccagttactccctttctgccctgcttctgcatcttcccttcatctactctcagtgccttccctttgaagatctattaggagcatgtcagtcatctctgtccctcagtgggagctgttccacctggctgtatctagttagccatcttgcctgatcctgatttgaaggatttttctggtggagttgaatgatcacccgtctcagcagctgactcttcactttaaacccaggaccaacctcagccatagtcccatggcagaggcaccagagactccttccaagtctcctggaccaacactaactcatagaactggtctctgatcctccaccatcatttaggttcatgacattggcaatttagggagtgtggggaactctgagacccttgtccaagggaaaagatgaccataaaaagctgtaaggcaaaaaggtcattggttaccttgttttgtttcccaaggccaggtgtgaggaggatgtggacctgttcagagaggttatctacacactcctgggactcatgatgaacctgtgtcttcaggctccctttgtctctgaggtatggcattcttgtctccctgcctggagccctgggacaacctgtacacattctgtggcataaaaccattctcatgttcacgaagagacagaagcatgtacactcacacactggccgtggaatgggaaaaggctggagggatgcgctctccctttgctctgctgagggatggatggatcaccactcagtcatgtattcactcagaaaacagactgggtatccaaggtgtgctgagcagagtatgaggtgctgcatttacaaagtcaaataaaaggcggttcctgctatcagggtaatgccctggagttaggggagacagacatggggaggaataaaagcagtaaaagatggtgttgtgagggaacctgggcatagtgtggtggtgctaaaaaggagacggtgctcagaagaagctccgctgagaattcagattgtcagaaaattaaaatctcctgctggcctctccccattgttgtaggtttgggctgtggaggtgagcagaaggtgcctgtctttactaaacagccaggatggaggaatcctgacagtaagtttctcccagggaaatccagaagcagcttccattgttcttgttttgttttgttttgttttgttttattatcagtgtaatctttttgaagttgccacctttgagaatctgctgactctgagatatggtgtggatatactattcagaataatgtacacaagcacataaataccaggttttgtctacagtttcagagatttggtgacctccttgctgtgtccgtcatctgtggatcccctagagtccaggaacccaacttaagaatcccccttccgtatggtctgaaatttaaccagcttagatgatataatcgatccgatctgtcctatttcaaaatatcctgtgcaaattggacagatcaagtgtccaacttatttagaatcccttttttccataagaaaaaaaaaaagccaagcccatattttaagccagtgatcctagaggttgtttgtgcataatagttttaccctctttttaaaatatatgctgaaatggctttctcaattctgtgtctgacatttgaataagaaaactgagaaaggcctatatgttagcacagtgcatcaggagaagaatattagtatgattcaagaggctatttgccatcaccctagaacgtattcttcactcacattaagtgatcacccgtttttctccctgtcagggcaggaccctaatggctagggaagcaattagggccacatctagggtgggtctgggaaaccagcctttcaagggttgcagactgaggactgcctccacagtttaaaaaatgttctgagtagatccaacataccctgtttgggggtagcactctttaaacgtccccaaagtcaattcagacaggatagggcaaaggttttgtgcgtgtgcattttcacagacggggcatcgtagctttcatcagatcctcaaaagaggtctatgacccccaaagtggtaagcaccaccgtttccggatggtccagacctaaaggtgagcctacactagtgcctgagtaaacctttaggagagctcttgggccagatttccccagcattccttgtgtgccacgttgggtgcttcccagcttgctgagcagagcagcagcttcaccatgggcatctggtccttgtctagcacagtctccactgtcttgggcctgaaaggggatccgtggtgtcaactatagcaaaattctaggatctttaggaagcagattagggaaacaagattgataatacacaagtttatcttttctccctctggagacctcattaaaatgagattaaagccattgggggggaacaaaaaaagtagagacctacgttgacagtgaacaggcaatggttaccaataggtaagtaattttaacaagtttcctgaagatggagaacagctgcaagggtggtaattaatgaggcagggctgaggaaacctttgtatggagtacaaatggaggaacacgtagctgggcagtagcaggtttgccttataataccctggagaggatgaagatttcaaaactcccgatacaacagagagcagaagtacaaggcagtggagctgcgtttgctggcaggcatctatcctccaggcataaaatcagaacacttttatctctaaagaactgaaaaactggagaaaacatttttctttctagtatacgggggtgccacctctatatctttccatacttctgataaacttcccataaacatagcatgcccaaacatattttcttgcttttttcatacatgtgattgggcaggtaaagggtcaaccagacattgcaggaaagctacacacataaataggaaaaccaagataaacataaaaattgatccaaaagaaatagagatgatataggaaacagaagaaaaaaatagtaactatcatttgtatcctgagaaagatttaagatagttatatccataaaagagtaacagcttggcatttatttaaaaaaaaaaaaaaagaaagaagagccgggaaataaagtaaatgaactatcccagaaactagaacaaaagacaaagattcgaaaagataaagataaatgacacagaagaccaatccaggaaatcaaacatctccttataaagggcctgctgatatcagagctctgggaggaatcacaagggagaacttcctttctcagagtggaactggttgatcctgtgtgaagctgaaataatatgggcctctgggtggcaaggggctatgattacagctccttgacagctttattaaaaagaacagtgctttctattatttggccatcatattttttatattttgcttccaatataatgattgcttttgcctcaccaaactccccgttagcttttaaaggttgtcagcatttctgaaaaggacatttaattatcctctttctgctgtactcagagagctgctggtgttctgagccggaccctttcttcctctctgaaaattgttgaggaggccttgcgagcaggagtggtaaagaaaatgatgaaattcctgaaggtaagatcactttattggttacaacccctgaaatgtacagaagtctcctattttattcggggaacagaattaaggtgggctttgtttggttaatgtgctgccatttcttccttgctagattttaaacttcttggatagggatttgcttctgcctgtctacccagaccatactctgaacatcaacaacagattgttgaataaataagaaaattgttcattagatacatctataaaacctgcttacccctcaagcctgacttaaaaatatatggccactgttcttgataaaaatgatctgagtggctttctgtaacgtttctcaggcacattgttctgctcaggttttgctactcatgatgctttatacagttatctggagagtgttggatggaactccatctatgagacatgtagcctgcagaattaccatgtgaccaaaggatgttgggatttccctgtgagatgagtgtggtgaatctaagcaagccagtagagcagttatctggattcacctgcaagggcgaaggggattaatacactaggctgccatctcagaatcccacctatgatgtgtgtgcccatgaggtccatacacccatgttagtgtggtgacacatggcttttattcataaagcatcaggctgagtggcgcagggaagcatgctctgcgggctgctgctagggcaggggtgacactgagggggcagcacagggggtctgagtttagattgccacttgaacaatgactgtcattcattataacttttgcaaacccaccaaaagctcctgatggcatgcatacccatgcatcacacgtgcatacgtgcacacatgccttttaaagaccccacatgggtgattgcaagggctgtgtttgacagttgtcatctcttaaaatgatgtaggttcctgaagttcctcatgcaggactgtcagcctgacagccttagcaagtcagtcctcgttctcaaatgggaaaatgacatgggagggccttttcctccctttttggtagatctgccattcatcagcatcattctcttctcagccacttgctcataaagccttccggaggcaattactcaggtgtacatgacaggcctacattcctgtcaggggtgtgggctgggttagagaggatgcgggtgacactctgttccagcagggaccatgcctgcccaccaggaagcacatgccgttctcagtagaattctcttttcagagtttaggaagccactagcgctataataactgcttgctgtggtttgtggtcaagagcaatcatagcactgattttatttttctaatttcattctgaaatctagacaggaggtgagactgcatcacgttatgctataaagatactagctatctgcacgaatagttatcatgaagctcgggaagaagtaataagactggataaaagtaagtgatgatttccttaagggagcccttgtcccagaggttcatccacccttgaagctgcaaagggaactgtggtcgaggaggaacttagcagcaatgctgttaacctctcccagacttcagcaatgtttacagaagatgtttcacatccagatctgaaagcatttaattaaccttttggatgcacacaggtagaatgcccaggctggagacccagctgacagatggctcaaagataacagggtcaaagctaggaaactccctcctctcaccaagttcagttctctgccttcacagaaggagagggggaaacaccgtcaacgtttagtgaacaagggaaatatcagagtctgagcctaggtttagtccagtaacttaaaccggctgtagttattcacagcaggcttcccaggagaggcagcctgctaatgttcttcttaccaactccctggaatgcacagaaggtgaactgaaggaggctccaccatggaagcggcaagcctttctcctggatcctgttgcataccctgcaggtgtaggttgctggcacattgcctccacctgggggctgtcagataagacctctcaccctggcgcagtgagaggttaagaataggctttcaagaagacagacctgtctgacacacagcattcattcatctaacaactgtgttgtgctgggcactgttctaggaagcggagatacttcagaggttcagcaaggagttgaggaggttcatatgcattcagtgaatgtttgctgatgagtaagtgaacaagttctgctgcagagttactggggaagctcggtgtccgctgacatctccctgcacccctcatgtcctgttgccagcctcctattttgggattaaaaggagctgttgcttgttctcttctttccctgcagagttgagcgttatgatgaagctgctcagctcggaggatgaggttctggtgggcaacgctgccctctgccttggtaactgcatggaggtgcccaacgttgcgtcttccctgctaaagacggaccttttgcaggtcttgttaaagcttgcaggcagtgacacacagaagacggccgtgcaggtgaacgcaggcattgctctggggaagctgtgcacagctgagcccaggtatgctgtggacacggagccaggctgacctattgcagaaagagcagctgagctgaggtgctgagttttggctgggactgcatgccacacagaacagtgtgggaagccctcatgctttctgtgcagacctaggttaagcccagtagctgcttctctgaagaaagcctttctagaggaaactggggagctctcggtctccaaccagagagggaatcggcttgtctgacagggacgtgctgctcccacttgctgccgttgccttctctccattccattctccactgttttgcatccctctccctgtctctttatcctccttcttcccctccctcccactccacctccccttctcttccctcttttctctcttctccacttttccagaaacagaccccccacttcatgttctttgcctcagcctaaacaaatggaggaacggccagcaagggtcacatgttcatgcaggagaaaacagtggagaaggagagacgcagaacagcatgccgaggtccccagtgagcgagggcaagagatgtgggctgtaactgtgcccatggcttctctgttagctcagacctccactctgctctgctcctcttctgatgtgcagacgcatctcattgcacgtgcttttgggaggtgtccacctgtggctgagcaaaggagccctggcatagagcaagggtaaccccgggagctgagtgagagaggctccttcccttacatccacatgcctttaattcctcctctgtagattgagggggttggccttgataatatctaaggtcctttcaagttctgtctggttgttcaaatggaaggaatagttaaaatctttcttctatagaaagaaagcacattagctaggatgacttcaaagtggcaacctatgggggagttctcgagagcaaggtcctgtctgatcagcctgacacacctgccacctgcagcgagtgttttcagtgctttgtgggcctccctgagggtcttacttacccctgtgatctttagggtaccccaatgccacagccacttcctgtttccacccagagtgataggactgacgttctcagccagcttccatctgagagggtgttggctctgggctccagaagcctgaaccgtggcacttatgccctgggttgtttgttttgattgtgacagatttgctgctcaactgagaaagcttcatggcctagaaattctcaactctacgatgaaatacatcagtgattcttgagagagacagggtttgtgtgcatttggggaacacacagatgcacaccgtgtgttgttcctatgctaataaagacctttgatgtatccacttcagaatcaagtactcatttttagagtgtttgcatttcaggttttcacgggtaacaagagagtgggcattaggctggctgctgtggtgggctctgtgcactggcttactcgacttccattgtaccctcctttgaatgttctttcctgttctgtagaagctagaaaccatctcacaaaaagccacattgcccagactcccttgtagcaacgattctagatgggaactagtggccaatctaatgccacttcctaccccttttgctattttctgctggcaatatgctagaaacatcagatttgttggtagcagcatttcagctccgtttttccagctgtggagtgctgagagagagttgcattggcatcattggtggcctgcagctgactcctggcctgcagccactgcatgtgccgttaaattcagtggggtgagtggtaggtggtgtctcccctgttaggagaactctgcgtgaatcattctgggaatcattcctgggggtccctctggcaccctcctccagcccatctggtggtgctataggcaccctgttccatgggttagattgttctctgctaaaggtgccaaagcacaggcttctctttctacagtgaaccctgactgatgcaaatgtgttgatttccctaacccaccttgtactctcaccccatccccagaggcaacgctcccttccagttgccccagggtcactctaaaccagggtcacctgtggactgcaagtccctaagtgagaagtccaataagtggcattatctctggctccttacaatcacagaatcattttagagtaggaggcagggtcttcatggtacagtgaatgtcaggagtcccagaccaaagttccaaagacttttggtcgtaccctgctacctgccctgccagccatgtgactttgggcaagttgcttaacctctctgagctttggctactgcttctggaaacactaatacctgcccaacctacctcctccattgttgtaaaggttaaatgaagttttggaggtgaaggcactttgggaattataaagtactacgcaaatataagagattaccagactctatcttgagattgagggtgtcaactatgacgtcatttgggttaagtttgaagggtctgggaaaggatgaagctcatgtcctttaaggaatcaagctggccattctctgaagcatgtaggaaaggaaatcctcctcctccagggagatgttattcaacacacccaaagaaagtgttcttcacaggtaaggcagctgttggcttaaattaagaacttcgtttctgaaacggagataaataattggcatttggtgacgggggtgggcggtggaagaaaatcaatggcctgagcccctcattcagattgatgtactgcgcatggctggagggagctcactggggcactctgtggtggcgccctgggtggcaagcaagtgacaggccactagccaggacctgcccatcagtcctatcatgcaaacaaacacccttcaagaggctactgaattgcaaagggagaacggctcgatgctaatcagagcacaaagaagaaaattagagggtgcaaaagttgctgttttcacagaattccgtggagctttgaaaacggaaaggctgtttgtgttcataaccaccagccctgtctcctttgaagttcaggccccgccttcccctgctatggctgccctccttcttggctcttgaaaatggctatgataggtgtattctcttccccaaagagtggggaatgtcaaattacgttattatgtttattgttccagagtgcctgccgagagcagtcatctccaatttggaagagagtctgctgcacctgaagctctgtctcctcgcaggtgggaagagatgtttcacatgctagtattctccctctccagtgtggatccacccccgccaccgccccaaacttgttacccctaacacatgctaccatgcagaccttccaggcagcatggaaaataccagcgccatctttcagaaggcctcatctccacttgccaggagccccgacaccacccttggagacacggcttgttccaggtaatcagagtcttctggttcaacaagcagaggagctgggattttccatcctaaagaggatgtggccgggatggaactccatcaccatcctgaagccacagcagaggtggcaggtaacagacagtccagagctgctcactgtcttcatacatgacgtgaggacggtggttccagtgcgccgcaaggtgggactgaggttcagagttgagaggaaacaataggaaggggctgagatgctgcaacaggtcacgggctgctattgtaaacacttttttaaggataggttcaaataagagcttcttggcttggagaactgaggggaagtatgactaagaagtattaggttggtgcaaaactaattgcagtttttgccattaaaagtaatgacaaaaactgcaatttcttttgcactaacctaatattctgaggacaagaagacatttaataccacatgactttttttaagtaagaggtctcattttctaaataacttgaaaatagaggctctccaagggttccgttacaggagagaataatcagaggtgaagaaaacccatttagagctgactccctttcccagggaatgagcttttggtcctcatagactggcatcctgcagacacgcagagagaaagaataaagcctgcctgtgcattgtttgtttgtttgtttgtttgttttgaaacagagcctcactttatcggccaggctggagtgcagtggtgtgatctcagctcactgcaacctctgcctcccaggttcaagtgattctcatgtctcagcttcccatagctgggattacaggcatgcgtccgtatcccaaattttcatatttttatgaaatatggtgtttcaccatgttgaccaggctggtctcgaactcctgacctcaagtgatccacctgcctcagcctcccaaagtgctgggattacagatgcgagccaccatgcccgcccccccaccccccgtgcattgtgcctttgctctgcactaggcaccctatcaaaacttgaagatcctgccctaacataagcctcataacgactgtgaggtgggtattatctccactttacaggtaaataagataaaaacagaatagtactttcccacccaggatcacatagccaggaagcaggggagtcagaatttgaccccaagctgtgttcttaactcttcctgcatgtaaaacattcctctccttactaagtgtgacctgcagaaaagtcaccacatttctcagagccccagtttcctctctataaaatgggagcatcaacacctacctctccttctgtggtttggatataatatacatgaagtacctagcataggtgactgacagatagaaagtatttacttaatggcgactctttttgagaacagaaatgaccatgagcccattatctgccccctcccaccctcacggatctgcttatcttccttggtcctccgtctcactgaaggcaagcatgtatttggctctgtttacctttccctctctcctgtgactggtggcaaacatgaagatcccccaagagccagctgccagccagaagcctgccttcttacatgaccccatggcagcagggcctgagagcactggtcttgggtgggatggggttcagagcaactcagggctcagggatagggtagcagcgctccttgtcagggcctggggccaggggtgcatgggcatcaacaggacccagtgtgaagtggaaggtgctaggatcaatgctctaaaatcctctttgcaaacagatactcctctgttacttgcagtttgtcctcagtttataatcaggaaaacctgttgattgcaatgactgtagctccaatcatatattcatcaggatgtcattagttcttttctcctaaagccccagagctgcatccccctaccctccctgatgccctagaaagaggagtgctagcccagcgggacatccagttgcccaccacctcctccagcagctcccggccctgtgggtggccacatgccagccaagcactgggcttctgtgacctgaagctgctggatgacttatttccttttaataagactcctaatttgatctcaatttcaaaaaggcaaaatgatgaaggagttctccctggagacattctgccctgtggtctgattttgccctggggctggatcaggctttcttggctgctctgaggctcagccctggcttaggtaggagggagccttagggtgctggcaaagcagggaacagtgggctgccgattacctctgccagccaccccagcctcagatctccccagttctggagcagggctcctgtcaccagcgggttggaaggaactgctttaaatgagggtggctgcctgccagatgtgctgattcagctcagcctgagcatcactccattgtcacatctgtccccaactttatgtttgggcttcttatcttcagcagctctggatgctcatttagatccctcaactcccctcgggcaacaagcacacacatacacacacccccacacacacggaattcatctcgctgctgctgggagatgaatttgcacattaaaataggtgagttaacgtgcaaggtgatttacactagatcaaaggcacagcaagatagtgagaattattggaacaagaggctgaagaaaaggctcctagaatgtccaagctgaaaagtattcagggatcatctaatcctctacagtcatccctttgtatccaccagggattgataccacagataccaaagccctgggatgctcaggtcccctatatgaaatgcatcatatttgcatataacctacatacattctcatatactttaaatcatctctagattgcttataatacctaacacaatgtaaattctatgtaaatagtggatatactgtatttcttaaaatttgtattattttttattgttggagtgttatttttattgttttttccccaaatatttttgatctgcagttggttgaatctgcaaatttggaacccgagggtacagagggctgactgtatctgctttgttggagtccatctgattcattgtctaaatacaattaattgctccaaaatggctagtccatgcccccttattttataaataaggaatctgagactcagaaaggccaagtgaagtatcttcaatgttcttacctttgttcaagaaccctctgaactaatggtccagagtggggtagggactccaacaagacccggagaggcaggaagctcagtggtgggagtgcaggctcaaagtcctcctccaccttgctttaaatttcataacctcgctttaagttttaagtttcataaccttagtgagtggcttagcccctcgattgccttgtctgtaaaaggcaataggggagatatgatacccacttcttaggtttgttgtggggattaaatgagatgatttctataaagctctcatcaccgtacttggcacatggaagccctgaggagatgggcactcctgttgtggtcatgttggttgagcatacttccatagatggccccacccggccatccctatatgctcttttctggggttcttaaatgtgaggatttttatcagggttggaagggtttctatgtgactctaccctaaaggtgggggataaagaagtaggcctccaaatggcaggctgagctggcaaggagggccgagagaatctagatggaacacagggcaggcacaggaagagcatgaaggattgaaatgtacattctgtggtattaggcattgctgaattctgcactgtatcatcaacatcaggggaaaataagaaaaagacaggtgctggatttagttaacttgacttattgccatagcctccttgctgatctccccatctcactccaccttctaagccatcatgcacactgcagccaggagaatcctctgaaacatcactttcattatgctgtacgccttcccaggcaccttctcacaactgtctacaagataaagggcaaactcatttgcttagtgtgtgtgcatacgtgcatgcgtgtctgtagggggagtaagaccacagagctttttaaattctctgaagttttactgataaagcactcacattattgtactttaactattgtaggctatagatgcattccgtatactgcatatgagtaagagctatgattcataagttttaggtataatttaaaataagcatatctattattatccctcaaattatttttctttataaataatagtgataaaattctacatggcctttgcacataaaccatccaacgtaatctgagcaagccttaaagtaggcttggttttagggtcatgttcttgttcccagttaggccagccaatgttgggcatcaaccctgggtgtcattgctcactatggtgttccagcatctcagggaagcctgagcaatgtttgttgaagggcagctccccaccataccatctctcctcttaggccagcttcccaatgggtgtctgcaggcattccactcactcctatatcctctgtttcaaagaccttctcctttcctctcttccaatcttacacatccacaaagccccaacataataaaaatgataggtatctcctgttaaatacttgactggtttcagatctgtctaatgaaacgggttctatcattattctccctttacagatgaggaaactgaggtgcaaagcagttaagcaactggtccaagatctagaccaggtactcaaccaccccactccacatgcaactgtccccaacccatgcgattcatcctttccctgaaggcttgtgtggtgctgccttttaaattcataacataatgacttcattgttatgaaattcttttctgtgtctttattttttctctccaactagaatttaaattcattaaggatttagaagattcattctcctgtgagaagtcttatagacaagaaaaagagaattaggcatagacagaagggttgtaatcacccttctctgagcatgtgtcattatggaggacaggaccttgaatttgggcttggctctgtcttcgagagtatgtgggtgagtcactagtagtgaacatgacttcccattctgtcgtggcattatttccaaactcatggccagacacaacttggctctcccattcctcagggaagtatgtggctgccaccacaattctccctctccacatgggcaaatgtaggccgaaagaccatccttcaaaggtctcagagaatcctggtgttttaggccaagcctcagccctgcagtgtgtctcttgtccatgataataatagcctcacacagggaagtgcttttatcttcttcaaaggcctttcatgtcagagatttcatttcatctgcacaacatccctgtgaggtaggtattattatttcccatttgaagctaagggaagacaggcccggagatccaatatcttgtccagaatttcctaaggctgagccagtgccaaaatccagcctttaccttgaacctctctgcccgctgcctggccctgtctctcctttcattaattttctggtccaaactgcaacacagtcaactagctagttcttttcacctgctccctgagtgcgaaggggaaaatgaaactaacccatttaaggttttatcagaaagcctcgttaatccacccgcagtctgttagataacagcttaaatctctccactgcaaaggattaccttcccatctgatcaggcacaacacattagaggaggcgtggggtgggcatgagcgtgtggaggccacggcgctttctctgcaaaaatggagatattcaaacttccggatctgctgtcctcccccagatgggctaggagcccagcatctgcctgtacatcaagcagctcctccgtgaagttacttgaatgacagcgtgttcctgaaaagctcctcactcactcattcattcaatatatatttgtcaggcacctactatgtgccaagtattgtgctagaaagtacaaaatgacattgggaaaaatgagtcctatttttctcatccacatgtattattattctagcagggcattgtcaaggtgaaaataactcagacacatacaaaaactccccttagtgctgtcagggccttagaacctgaaccatgcaccccatagcaggtatcacagaaatagccactgagaatagagggaagggcctggctggcctggaagaatctccacgtcttaacccttggataacaggagttatcactccaaagttcagaggttcaaagttcagacttctgtcggtctgctctcggtcatttataaatgaagggatctgggctgattaaagcaaattcgctcctatgtggtctttctt

SEQ ID NO: 649 - DNA, 27027 bp, Homo sapiens
  source 1..27027: mol_type = genomic DNA
ggcaccaccagccccctgcaaggggaccctaagcacagaggccctcgtgacccacgcaaagctctgaaggacacggatgggtaggggacacgtggctggaggctcagagtttgaggcagaggggatcagaccgtgccatgggtcatgccaggagcccaggactcccagacctcgtatcattaggtgttttaaagagaaggcgagggcaggccaggcgcagtgactcacgcctgtaatcccagcactttgggaggccgaggcgggcggatcacctgaggtcaggagttcaagagcagcctggccaacatgatgaaaccctctaaaattaataataaattaataataaaataattataataatatagaaaataatatataaaataataaatatataaaatataaaacaaaataaaaataaaaaataaaattaatattaaaaatacaaaaattagctgggcactgtggtgggcacctgtaatcccagctactcgggaggctgaggcaggagaattgcttgatcctgggaggcggaggttgcagtgagccgagaccgtaccattgcactccagcctgggcaaaagagtgagactccgtattttgaaaaaaaaaaaagagagaatgtgagggttaaacaaagacacacagagatggagaaagggcagccttacatcaacacgggtacattgcaaacacctgcagaggtgggggaccagctggatgccagagcccactgccgcctacgggctggggtgcctataggtatgggtgggagcggcccgggccacacggcttcaggatgaggccgtttgtttggcccttgttcccgcagaaggtaatcgtgatgttcctcggtgtttttccccgcagagtgttcaagtcaggtgtcgggcaggctgttcctcacggcccaaacccctgcggaatgcttcactttggccgaggtctgtgacacagcgaggggcttacagaaaggtgcagtttggaccgatagatgtgagtccccctctggggggcactcactttgtggagcccccggttcctgtttgcagaggggggcacagtggcacctcgtccgctgtggagtgagaacagggacccgaccacgtgaagcacagagaatgctcagggatcggcagccgtgtatccagccaacatcaccagggtgcacgcagagcctggcccgggccaggtcctggggtgctgagcatgggtggggcctgagagacggctcagggaccatcctgggagggccgggcggaggggcagcaactggggctcaggctcaggcagtcccagcagtgactgggaggcagctgtgcccatgaagctgtgcccttctccagcctcagccctcagcccggcttcccgggctggccccgccactcagcagcccctccccatcctccgaaaacccaagctcacctctgggttccggctgggtgggggttgccaggagacggttgccaggtcaccactgttgtttcctggcccaggctcccaggaccttgtgggctgggcaggtaagaagcgccggcggccaccagctggggtccagtgggctcggccccgccctcctacgccctgcctgcgggtcccctcgggaggctgctcaggagaggaggaggctggggaggggactggacagggatcgggtagggtggggccaggctgagcctgctctgcgggtcccggaccccagcgccaccgtgcgagaggctcgggtccaggccaggccggggaacggtgtgtgtacccggtggggtgggagggctgggcagccctgggacgagctccgtggcctgggaccaggtctgcctccgcagagcaagtcctggacggacggctgcttgagcccacaggtcgtgcgtcctttgacagcggcctccggccgggaggcaccagctcttcgaacaatgtcagtaccttcctagggccccacgtggccaagcttggattctggggggagaactcgcagcaggacactaacatgtggtcgctttttggatgatttcttcaggtttaaaagtctcttctgttcatcctaccggggtgccgtctcctgccggtcttttcatctcaccaggtaaaacgcttattttacaatttattgtaaggtcgtgcaccaagtttccacgccgcctttacaccgtgtccccaccgaggggcgtcacaaccgtcctccacaccgggcgtcaccggcttcccaagtcccaccgctataaaggacacgtcagtcagcatctcggagtgagacgctttccttctggattcagaatcgcgtccgtcagagactccaaagcacatttgctagatcgacaggcgtgaggagccagcggctcccggcgcttgggaggctgcgtcccacctgcattcaggccccgggttcaccacacacacagcgggcagctgcttaagaaacctttgatttcagtccggggcggtggctcacgcctgtaatcccagcactttgggaggccgaggtgggcggatcacgaggtcaggagtttgagaccagcctggtcaacatggagaaaccctgtctctactaaaaatacaaaaattagccgggcatggcagcaggcgcctgtaatcccagctactcaggaggctgaggcgggagaattgtttgaacctgggaggcggaggttacagtgagccgcgattgcgccattgcactccagcctgggcgacagagtgagacttcgtctaaaaaaattaaaaaaaaaaacacctttaatttcaatgacaagaaataacagctcacaacttatttagttatttgtgaacatcataaggacataaagttagaaaagcccaaaggaggcctcaggcttacgatgaaatcagcacctggctgcctcttccagctgctgcttcttctgcagcagaagagacggaggcagtttcctgggtgggggggtgggtgctgtgcttccgctttctaactgcctgtttccaaaaagcacctgatgctgctgcttctggagcttccagtgcagaaattccccgtggacggtgaaaggggcttgtcttccacacgctgccctgtccatatcatcccggcacgaatgatgtttggggcagagctgcccggcctccccgggtggtgcccatttgttttcctcagagttggcgatcgccttgcttttcacatgtgcttgtgttcccgcctatcctgagctgtccctgagctctctgcctcccgtcacccccacagtcaccatcaccacagccctgcagactgcgcagtgtgtggcgggtgctgtcctgacattacatgtggaaactccatctttgcagcaaccctgcgaggctgctgctcccagctgctgtgcaggtggagagaggctgctgttgtgcaggtggagaggctgctgctcccagccgctgtgcaggtggagagaggctgccaccgtgcaggtggagagaggctgccgctgtgccggtggagaggctgctgccgtgcaggtggagagaggctgccgctgtgccggtggagaggctgctgctcccagccgctgtgcaggtggagagaggctgacgctgtgcaggtggaaagaggctgacgctgtgcaggtggagaggctgctgctcccagccactgtgcaggtggagagaggctgacgctgtgcaggtggagaggctgacgctgtgcaggtggagagaggctgccgctgtgcaggtggagagactgctgctcccagccgctgtgcaggtggagagaggctgacgctgtgcaggtggagagaggctgacgctgtgcaggtggagagaggctgccgctgtgccggtggagaggctgctgctcccagccgctgtgcaggtggagagaggctgacgctgtgcaggtggagagaggctgacgctgtgcaggtggagaggctgctgctcccagccgctgtgcaggtggagagaggctgacactgtgcaggtggagagaggctgacgctgtgcagctggagagaggctgacgctgtacagctggagaggctggggcacacagtcatcaggtcagctgcaagctcacagctgctgcatcttttccctgacagctcactcctgtgagagtcttccaggcttcccggagggacggatgtctcctcaccttttcccacctccacaccttttcccacctccacacctggtaggccaggtatggaattcctggaattcccggctgggagcctcctgggccggttccagccctgtgtgtccccaggaaggctggagggctgctagtggcctcggtgggcacccagggctggccaggaccacacctccttcctccggctctgtgcctgtatctccccgggcctcccctctcgcctggggctccacggtgaccctgctgtgcggcacctcggatttacacccacagtcccatccccagggttcccttctgggcagtttccttgacttaaatcccaaccccggtgttgcatttttaattcccaccggctcttttgtattctctgtgcctttgctttaaaagcacgcggctctctgaggggtcctgtctccatcaccccagccttttccaggctggtttgtttccctgtttctccccttttctcttcctctgtgtgcgtctgtgtgtctgtgtgtctacatgtctgcgtgtctgtgtgtgtcagcgtctgtgtgtgtgggtgtctgtgtgtgtgtgtgggtgtctgtgtgtgtgtctgtgtgtacgtgtgtgtgtagacgtgtctgtgtgtaggtgtctgtaggtgtgtctgtgcatgtttataggtgtgtgtgtgcatgtctgtaggtgtgtctgtgcatccatgtgtctgtgtgtgtaggtgtgtctgtgcatctgtgcaagtgtcgacatgtctgtgtgtgtctgtgtgtagctgtgtgtctgtgcgtgtgtgtgtgtaaatgtgtctgtgtgtcattctttttttttttgagacggagtctcgctctgtcgcccaggctggagtgcagtggcacgatctcagctcactgcaagctccacctcccaggttcaagctattctcctgcctcagcccctcaaggagctgggactacaggcgcccaacaccatgcccggctaattttttgcatttttagtagagacaaggtttcatcatattagccaggatggtctcaatctcctgacctcatgatctgcccgcctcagcctcccacagtgctgggattacaggcgtgagcctccgcgcccggctgtccttgtgtcactcttcttcacacttgggagtccctctgatgatgcctgttgggcctgggcagcccctttggctgagagtcagtactttagaggatccccttccccagcaggaatcctgggtgctgagggcccatgagaaggagctgaggtctcccatttaatgcagagtcttgcacgcacacacctgctccgtgcctgcgcagggtccagcctcttccaaaagtcctcctgttctgggtggggaggggtctcagggctcctgacttcttccattcttgcccagcccaccctaggaagagggcgtgaggctctcccagacacaggtggggggcccagcctgtgttccgctcctccctgaggacgggtcccagtggccccacccgactgggtcatcgtgcagacggctgcctcagtttccccaccttcccctgcccgtgggcttcctcgttgtctccttccctcctgtcactcaggcggggcagggaggggcagacacaaaggcttcctgcgggtgagattggtgccgagctctgtgcccagcctggagcctcaggcctaccccagccttctccagcctcagagcccccacagcctctgcccaacactgccgtgtgctcccctgtctcctgggcgagttccttcaaacccttgaaagccctcacctaagccgggcacagtggctcacacctgttatcccagcactttcagaggccgaggcaggcggatcacctgaggtcgggagtttgagaccagcctgaccaacatggagaaaacccatctctactaaaaatacaaaaagttagctgggcatggtggtgggtgcctgtagtcccagctacctgggaggctgaggcaggagaatcgcttgaacctgggaggcagaggttgcagtgagcctagatcgccccattgcactccagcctgggccacaagaatgaagctccgtctcaaaaaaaaaaaaaaagttctcacctcccaagcagccccaagatgggtttgtttgctggagacagaggtagaaagatctgtcgaggaactggctgaaaattcctaagttgcaacatgggaaggtgttgctggagacagtgtcctgggggtcgggcctggcacccaggggcggccgcagaggaaccctgatggcaggtaccaggcggctgcacacagcccacagctgggctccggggtcagcagcggagacagagaagacccctgctcaggccaaggagccctcccaccctccattcttcaggcaggcgccccacccagcaggcctgacgctgcccctccttccagccggcacccaggccgagctcagccacacctgaagagccgctccggccagggaggacatgcccggcagagacagggtgcagagacagcctcgcccccacacggcgccaggccccacagctgccacagagacgggagccagccgcacgcagaggctcaagcccacggccctgggaggcgccctttcctgggcagggtgggcctgactgcctgctccatccaagcactggggcctcgggccgcgcggaggtcccacaggagggtcagagcggcatcttcccttcagggccctcgcccgggcaccccccggccaatggaccacagctgcacccggttcatccaccgccggggaccacccactcggacccgagccggcttcaagaggggcaagaggccaaggatccagcagaggcctcgggctcgagtctcaggtgaatagagcagccctgggtggcctcctacctctccaaggccaaggcctccctgggacgggtgccccatacccaaggaagtcagtcggcctcatggggcaggggcaggatccacacatggccatgccccgctgctccgagagaggggccagctgtgggcgccgggctctgcaggcacagaggggagctgtcgcgctccgcggcccagggttccgcctggctggcaccacccctggaagggcagcccctcgtctcccggcctgacaatggccccttgggtcacccatgacatcatcatggacattgtgacccctgccctccagggaccatccctgcgtcacgtctgcacccagcaccggcctcacagcccggcccctgccctgcaccaggccactgccctgttggtgaggagggtcggaggggcgacctccctgccccctgctccaagctccccacccccacctggaacctgccggcaggaagcctggccctggagggtggtcacggcccctccccagatgtaagcagtccccaggccgcctggtggggccagagctcgggctgaacttgagccccagacgggccagggggattgtccagggtattggagaaatgggctgggagcaaactggctgagccatgtccgggctgagtgggcagctcccgtagccaccccggtgggaccccaccccgttcacaggcccggcccacgagaggccaatggggagcagccaggaggagggactccggtgtcagccaagccagccagaccacgacgcagatggacactgtgggccggacctggagggggcagaaagagcctctgccacacccggaccccctgggctcctgaacagccaccggcctgcagactcggatgacactaacgccgccgggccctcagctgccctcctggaggggctcctgctggggggtgggaagccatcgccccacagcacccggccggggcccttcttctacattggaggcagcaacggggccacaatgtgagtagcggccctgggcgcccgtggtcccactgaatacccaccgcctgctcccggggcccagcccggcctccgctggccgcccgccatccccaaccccttgcctcggcccccaggtcacccccgcccccacccctcgcagcatcagctcctactgcaaaagcaagggctggcagcgcatccatgacagccgccgggacgactacacgctgaagtggtgtgaggtcaagagccgagacagctacggcagcttccgggaaggtagcgggagccggcaccagaggcgggcagcctgcaggggcctcctgggccggagcacagggcaggttggaggggtggggaccgaggtcctgcgctccctccacacgagccctggcctctgacctccaggagagcagctgctgtaccagcttcccaacaacaagctcctcaccaccaagatcgggctgctcagcacccttcggggacgggcacgggccatgagcaaggccagcaaggtgccggggggggtccaggccaggtgagtctgcccctgcccctgcccccgtccctgcgcccgcccctacgcctgcccctgcccctgcccctgcacccgccccacccctgcccctgcgcccgcccctgcccttgcccctgcccctggccacccaggctcccaggctggctccagcccctgcccctgcccttgcccctgcccctggccacctgggctcccaggctggccccagcccccacccgtcagcacctgcctccaccttccacctgtcctttaaagggccaaacccctgtcccataaacccaccctcttcctcgtggctgaacggggaagatcccacacgtccccaacccactgggcctgacacccacccacctgtccatctcacagacccacccaggtacaacccacctgtcaatctgccttcaccccaaacatccatccaatccatccacaatcccacaccgtgcccaccgtcacctgtgggtgccctgagtgaggccgtccatcgctcacccaagtctgggccatccatcctagcgacttcgtcctcctgctcccagccctgcccactgcccttctatggacccacctatccctcctcacttcatttggcccagacatttttgcaccaagcacccgcccagccaaccgcagctgcctccatctgcaccccccgcccctggttgcctgtgacaccagctttacaccatgtccagcgtccacttccagcctagagcaacacagctgtttcccccaggcaccgccgtccacccagccacctccttccaccacaactcacagtccgcccactcaccacccatgccccatcccccagtccccacccgctccaagcaccatgagctggcccctcagtccaggccctctgtcccctgggctgcaggctggaaaaggacgcagcagcgcccgccctggaggacctcccgtggacaagcccaggatacctcaggccacagaggtagactcagcccagctgtgaggggcccttcagaccgaagttcagacctaaacctggtgtcgtctgaaaaggagaaagcggggcgggggtcccacacaaaggaaaaccacgagctagagtcagaggttcagccaggccaggccgagatccacgctgaccccccagtgcacacagagctggggcagggccaggggctcaggccacgctctccgcccatcccagccgtgaggacactgccatgaggtggtggctcacaaatggctgagacggtgccagccgggagagcaaccatgagggaaaaagcagccagcgggaggggcccgggtgggggtcagcggccagaaggatgcagccagcagcacagcccgttgggggggtgctgcaaaggggcaggaaacgcaaagtccccacaaggagaacggccgcgggcgccaggtgccactgcccacactccctcccgccgggccacaggctgggcctcaaaccgcccacccagccaggggcgaagggacagcagctcatcctcctgcctccctgccctgcagggtcctgagaatggaagagtttttcccagagacctaccgcctggacctcaaacacgagagagaggcctttttcaccttgtttgatggtgagacgctgctggccggacaccaggctggccctggggagacagggtgagggctggaccaaggcgggggctgatgagggcagggctgggtctggaggggctgcgtggggctgggacgagacgaggtggtcaggaaggggccagggctgggcctggtctgggtggggactgaggagttggaaaggggagggtctggccttcgtggaggttggggtatgagggcactggggccagggctggagcttggtccgggtgagcgtggtcgaggcacgggcaggagctggggccaggcgtgtggttagcgcagggccaaggttggaatggccgggccgagggtcgcagcctggaggggagggtcctggtcgggccctaggaggggcgtggctgggttgggggcgaggccaggggctcaggccgcgctctctgcagaaacccagatatggatctgcaagcccacagcctccaaccagggcaaaggcatcttcctgctccggaaccaggaggaagttgccgccctgcaggccaagacccggagcatggaggacgaccccatccaccacaagacgccgttccgggggcctcaggcgcgggtggtgcagaggtgcggcggcgggtgcccggaggggtgagggtctgggctggctgacccgggccccactggtgcagtcagcagggccgccgaggagcccttggtcgtggaaagcagccgcaccaccagcccctgtgcagaccacagccgggcccccgtgtagccagcagaggggaggggtcacaccaggccggggtcacagacacaggatccagggttgaggggttagtcagtttgtccttcagctggggccccctctgtcctgcaggtggcctggcctgggtggcctcccggctgccagcccccctactccccggcccagccagccagctgcagccttcaggcctatggccaagctgaccactccttccctgagtgggaaggcttcctccagaaagccccgtggctgcacgaggctgaaggtttagacctgtcgacctcacccccggccctcgtagagcctcactctgaccacagctgccgtctgccgtccccagcttccatcggctcctccctcgcgtccctccacctggcgagctctccgcctggcgcaccccctctgcctgctgtgctccctctgcctagcgcccgcctggcgcgctccttcccttcctctccaaagccaccttcatgccctcctcctccaggcagccctccaggctcctactgcggttatgccctggagcacccatcagggtgccaggcctttcctcccaattcccctgacatattcaggcccagaaatgccccctttccctggaggtcacacctgggacagaggcggggcgctgaggaaatggaacaggcccggggtggggtgtgaggggatgcaggccaggctggccccgtggctcagcccagcagccccgacatggtgcccccaggtacatccagaacccgctgctggtggacgggagaaagtttgacgtgcgctcctacctgctcattgcctgcaccacaccctacatgatcttctttggccacggctatgctcgcctcacccttagcctttacgacccccattccagcgacctcggcggccacttgaccaaccaggtgagtctgccatgggtgagggccctccctgcagccttgggatgagattagaaggaggttctcactgctagggggtgcagagggggtgcagctacagaaggaggtggcccaggccgggaggtgtctcaggcctggaagtagcctgggctgcccccgctggcagtgagcactgcctctcacctcccgcttttggccacgtcagaagaagggcgtggcagggaccccgttagctggtgaaagggctcagagccctgtagccctcagcgtgcagcctggctcccaagccgcagctgagttttctgaggatggggtgcgggtgggcgtcggaaccgaggggattctgaggctgtcagaggaggggccctgtgggcagagatttctggggacgggtcttcatgggagagtccagggtagggaccttctgagaagatctgtggggtcctcacggctgaaggggggtctcagcggatgaaggtttttgtgggagggtctttgcaggcaggtcagggtggggccgggggagcaaggttaggggcggctgtctcagggacccccagagaacaggccttctaggttagggggatgttctcttggggacccccgtgaggacaggccctccggacagtctgggagccagtctccaggcaccgtgtgcccccagttcatgcagaagccttctaggttagggggatgttctcttggggacccccgtgaggacaggccctccggacagtctgggagccagtctccaggcaccgtgtgcccccagttcatgcagaagccttctaggttagggggatgttctcttggggacccccgtgaggacaggccctccggacagtctgggagccagtctccaggcaccgtgtgcccccagttcatgcagaagaagagccctctgtacatgctgctgaaggagcacacggtgtggagcatggaacacctcaaccgctacatcagtgacacgttctggaaggcccggggcctcgccaaggactgggtcttcaccaccctcaaggtgcgtccactgtgccctccagtctgggagtgagatccctcggggcgggggtgtgtggtcaggctgggcaccaggcacacagatgtccgtggcgtgcgtgggcggctgcgctgaagtgtgacctgaccgtgtggaaccaaacccttccagcgtctctgctcacttagctggcagtgcctgtccccagcagccagcaaaggcccggacggaaagcccagtcgggggtctgtcggcacgagtcccgcgggcagcctcgccgtagggtcaggggacagctcggcttcagtgacagccaccatgtgaagagtctttgttcctttcagatcctccacttggcaggcagggccaacagcagcccccgggccaggtgtcctggagcagcagcagctgcccgtgcaggcccggactctccctagctaagggccatgtgcggtggagtgtcctaattttgcagggttcctttctgtgggggtacctgtggggtacttcaaacagccctagcagcaaaggcccttgagcagcgcggtgtgaaactgggataaaaacggggcttggccgaaggacttttatctgtcttggtcaccccggccaggccccggaagcagcagccagggatggtccttcctcacccacaggcgtgtgtcactgtggctgggacggcagcgctcagaggagcctccagttactttcctcacatctcccaaactctctcttaattgcgataattcacagaacataaaattcacgatcttaaagtgtgcagttcagtggcttttagtatttcaaaagttgtgcaattatcaccaccaattccagaacatttcatcacctcaaaaaagaaacactactaacgagccatcacagctacattgccggccattcctggtcaccgctgatggaccttctctctctctcctgtctcctttctcttaccgtggtgttttcagggttcatccacgtagttcacgtatccttttcttttcttttttttttttttgagacagagtctcactctgttgcccaggctggagtacagtggcacaatctcagctcactgcaacctccacctcctgggttcaagcaattctcctgcctcagcctcccaagtagctgcaactacaagtgcccgccaccacgcgcggctaatttttgtatttttagtagagatggggttttgccgtgttggccaggctggtctcaaactcctgacctcaggtgacccgcccgcctcagcctcccaaagtgctgggattacaggcgtgagccactgcacccagccatgtatccctttcatacaacgttccgtcatatggatggaccatattttgccatcagctggtggacacagttttattattgagctgttatgaataatgttgctataaatattcacacaaaaatgtttgtatgaatatatattttcagtgctcctgggaaaatacccaggaatggagtcgtgggtcacagggtgacacacttaactttctgaggaaccaggaatcacttttccagtttctccagatctcgccaacacttgttattttcctttctttattaaagaatcaccatctggtcggtgtgcagggatatctcattgtgggtttgatttccattttgctaatgacaaataacttcatgtgttcactggccagctatgtatattctttagagaaatgtctattcaaacgctgtggctgttctttaccatccagttgtgaaagttttttttgtttgttttttgtttttttttttttgagacagaggctcgctctgtcgtccaggctggagtgcagtgatgtgattctcggctcactgcaagctccgcctcccgggttcacgccattctcctgcctcagcctcccgagtagctgggactacaggcgcccgccaccacgcccggctaattctttgtatttttagtagagacagggtttcaccgtgttagccaggatggtctcgatctcctgacctcgtgatctgcccgcctcggcctcccaaagtgctgggattataggtgtgagccaccgcgcccggccaaaagttctttacatattctaaacactaggcctttatcagacatatgatttgccaatatttttctggaatattgtggctgtcttttcactttcttgataatgtcctttgaccacaaaagcttttagttttgatgaaatccagtttatccatttttttcctttggttactcatgcttttagtatcatatctaaaaatccattgtgccaggtgcggtgactcacgcctgtaatcccagcactttgggaggccatggttgttagatcacctgaggtcaggagttcaagaccagcctgaccaatatggtgaaaccccatctctactaaaaatatgaaaattagccaggcgtggtggtgggtgcttgtagtcccagctacttgggaggctgagaaagaagaattgcttgaacccgggaggtggaggtagctgtgagccaagatcgtgccactgcactctagcctgggcaacagagcaagactccatctcaaaaaacaaaaaaataaaaatccattgcactttgggaggctgaggaaggtggatcacctgaggtcaggagtttgagaccagcctggccaatgtggagaaaccccatctctactaaaaatacaaaaattagctgggtgtggtggcgtgcacctgtagtcccagctactcaagatgctgaggcaagcgaatcacttgaacccgggaggcagaggttgcagtgagtggagatcgcactgctgcactccaacctgggtgatggagcaagactccatctcaaaaaaaaaaaaaaattgccaaatccagcagagtgaaaattacacttatgtttctttctaaaatggtatagttttagctcttatatttaggtcttggatccattttcagttaatttttgtgtatggtgtgagttagggatccaacagcattctcttgcatgtggctatccagttatcccagcaccatttgttgaagagactattctttcccccatggaatggtcctggcatagtatcaaaaaccaattgaccagagctgcaagtgtttatttttggactctcagttccattccattagtgtatatgtctgtctttatgccagtaccacatggttttgattgctgtagctttgtagtaagtcctgaaattgggatatgtgagtctttcaatattgttctttttcaagattattttggctattcaggggccccttacaattccacaattccatatgaattttaagattggcttttccatttctggggaaaaagtccaatgaaattttttttttttttttttgagacagagtctcattctgttgcccaggctggagtgcagtggggcaatctcagctcactgcagcctcgcctcccaggttcaagcgattctcctgcctcagcctccctagtagctgggattacaggcacccaccaccacgctcggctaatttttgtatttttagcagagaccaggtttcactgtgttggccaggctgatctcgaactcctgacctcaggcgatctgcccacctcagcatctcaaagtgctgggattacaggtgtgagccaccacacccagcctcatcgaaattttaataggcattgcattgaatctgtaagtcacgtagcagtggcatcttaacaatatttagtcttccgatccatgaatataggatgtctttccatttttctaggtcttcttccatttctttcagcaatgttttctagttttcagcatacaagtctgtcacctacggtaaatattattctaggtattttattattttgacacttgtgaatagaattattttttaaatttcctttttggattgtccattgctagtgtataaaaataaaactgatttttgtgtgttgatcttgtatccttcaactttcctgaattcacttattagctccgtgtgtgtgtgcactcttcaagatttttatataaggatcatgtcatctggaatagaaacagctttacctcttcctttcaaatttatatgcattttatttcttttcttacatattgccggctacttccagaacaatgttgaatagaagtagcaaaagcagtcatccttgtttgttcctgatctgaggaggaaggccgtgggtttctcataaatgccctcgtcaggttgaggaagttcccttctgttcctaattggttaagtgttttttgttaatatcctagaaggatgttgaaatctgtcaaatgctttttctgtctccactgagatgagtgtgtcttatttccccttcattctattaatgtgttgtatcgcactgattaactttcatatgacaaaccccgcttgatgatggtatagaaccatttaaatttaaatatgctgttggatttggtttgctaatattttaatgaggatttttgtgtctgtgcttataagcaatactggtctgtagtgttcttttctcgaatgtctttgcctgggtggtattaaggtaaccctggcctcatagcatgttaggatgcattctttcctcttttatttttggagtctttgtgaaggattgctgttaattctttgtttgaaataattcaccagtaaagccacctgggttttcctctgtgggaaagtttattattattattactaatactgctgcaatctttacttgttataggtccatccagattttctaatctttagtctgctttattttgctaagaatttgtccatttcaccaggcacggtggctcatgcctataatcccagcactttgggaggccgaggaaggtggatcatgaggtcaggagatcgagaccatcccgggtaacacggtgaaaccccgtctctactaaaaatacaaaaaattagctgggcgtggtggcgggcacctgtagtcccagctactcgggaggctgaggcaggagaatcgcgtgaacccgggaggcggagcttgcagtgagccgagatcgcaccactgcactccagcctgggggacagagcgagaccccgtctcaaaaaaaaaaaaaaaagaatttgtccatttcttctaggttatctaatttgtttagtgtacaaagtattcccttgtcatccttttaatcaatataaagtctttctcccctgattttagtaatttgattcttctctcctttttttttttttctttttggtcagtttctctaagtccttatcaattttgttgatcttttcaatgaaccaactcctggtttcactgattttctctactgttttctattccatttatttccactctatctttattatttccttcttactacttgccttgggtttagtttgctcttcttttactaattttttttttttttgagatggagtcttgctctgtcgcccaagctggagtgcagtggcacgatttcagctcactgcaacctctgcctcccgggttcaaatgattctcctgcctcagcttcccgagtagctgggactaagggcacgtgccaccactcccagctaatttttttgtatttctaatggagatggggtttcaccatgctggcaaggctggtctcaaactctctttttctaatttcttaaggtcaaaagttaggttatgatttcagttttttcttcttgcttaaggtaggtgcttagtgctatacattttcctctgaccaccacttttgctgcatccataagattttgcgtgttgtcttcattttcatttgtctcaaagtatttttatttttattttttattttatttgagatggagtttcgctcttgtcacctaggctggagtgtaatggcgcaatctcagctcactgcagcctctgcctcccgggttcaagcgattctcctgcctcagcctcccgagtagctgggattacaggcacctgccaccacgcctggctaattttgtttgtattattagtagagatgggggtttcaccatgttggccaggctggtcttgaactcctgacctcaggtgatccgcctgccaaagtgctgggattataggcgtgagccatgatgctcagctgcaaagtattttaaatttcctttgtaagcttttctttgacccattggttgcttaagggcctgttatttaatttccacatatttgtgatttttccaattttccttctgttattgacttctaatttcattccattgtgtcagagaacatactttataatttcaaccctttaaaaattattgaaaaattattggagctggtgtgttggcacatacctgtaattccagctactcaggaggctgagatggaaacattgcttaagcccaggagtttgagtccagcctgggcaacacagcaaaaccccatctttaaaaaaacaacaaacttactattcattaagtggatcattaaaaaacaaaaacaaaaaacacttgaaacttgtttatgtcccagcatatggtctatcctggagaatatccatgtgcactggagaaggaggtgtatcctgtttttgggtgtagtgttctgtagatgtctgtgccgagaccagctcggtcggggagaccctaacccggcggcgctagaggaattaaagacacacacagagaaatacagaggtgtgaagtgggaaatcaggggcctcacaaccttcagagctgacagccctgaacagagatttacccacatatttagtaacagcaaaccagtcatagcattgtttctatagatattcagttaactaaaagtatcccttacgggaaacgaagggatgggccaaattaaaggaataggttgggctagttaactgcatcaggaacacgcccttaagacacagatcgctcctgctattgtttgtggcttaagaacgcctttcagcggttttccgccctgggcgggccaggtgttccttgccctcattcccgtcaacccacaacctcccagcgtgggcgttagggccattgtgaacatgtcacagtgctgcagagatttgtttatggccagtcttggggccagtttatggccagattttgggggggggcctgctcccaacatgtctgttaggtctgtttggtttataatgttgttcgagtcttctatttactcgttaatcttctgtctctgtattgaaagcgggatattcagttgtctacttctcccttcagatctgtcagttttttgtatatttcgaggctctgttgttgggtgtgtgtatgtttatgattattagatcttcttggtttatcgttataaaaattttcctttaatctgcagtaataatttttgtgtaaagtctattttctgtgatatgagtgtagacactccagttggtataagtgtagacactccagttgatatgaatgtagacactccagttggtatgagtgtagacactccagttggtatgagtgtagacactccagttcgtatcagtgtagacactccagttgatatcagtgtagacactccagttggtatgagtgtagacactccagttggtatgagtgtagacaatccagttgatatcagtgtagacactccaattgatatcagtgtagacactccagttggtatgagtgtagacactccagttggtatgagtgtagacactccagttcgtatcagtgtaaacactccagttggtatgagtgtagacactccagttgatatcagtgtagacactccagttggtatgagtgtagacactccagttgttcatatcagtgtagacactccagttggtatgagtgtagacactccagttggtatgagtgtagacactccagttggtatgagtgtagacactccagttctactttggttaccgtgtgtggtacatctttttccatccctttactttccacctatttttgtctctgaaactaaagtatcttttgtagatggtatatcatgtttttttaagaaactccgtcaatgtctattaattggaaagtttaattcacttacatttaatataattactgataaagggccgggcacggtggctcacgcctgtaatgccagccctttgggaggccaaggcaggtggatcacaaggtcagggattgagaccatcctggctaacacggtgaaaccccgtctctactaaaaatacaaaacattagccaggcgtggtggtgagcaactgtagtcccagctgctcgggaggctgaggcaggagaatggcgtgaacccaggaggcggagcttgcagtgagccaagattgcgccattgcactccagcctgggtgacagagcgagactccgtctcaaaaaataataataataataattactgataaggtaggatttacatatgctattttgttatttgttttctatgtctgtctttttttgttcctcagtttctccattactgcctcctattgttttagagagatattttctagtgtagctttttttttttgaaacggagtttcgctcttgttgcccaggctggagtgcagtggcgtgatctcggctcactgcagcccccgcctcccggattcaagcgattctcctgcctcagcctccctagtagctgggattacaggcgcatgccaccacacccggctaattttttgtatttttagtagagacggggtttcactatgttggccaggctgatctcaaactgctgacctcaggtgatctacccgcctcagcttcccagggtgctgggattacaggcgtgagccaccacgcctggcttagtgtagcattttaattaccttgtcatttattttactatatgtttttgagttattttagtggttgtcctgaggattaccattaatattgtatcttaatttactacaattagggtgagtgtggtggcttatgcctgtaatcccagtgctttgggaggctgaggcaagaagatcatatgaggccaggcatttgaaagcagcctgggcaacatagtgagaccccatctctaaaaaacaaaattagctcagcatgggagtgtgcacctgtagtcctcctagctatttagggggctgagatgggaggatcacttgagcccaggaggtcaaggctgcagtgagccacaatcaaaccacattaccccagcctaggtgacagaacaagaccctgtttctaaaataaaaaatgttttaaaataaacaattcagttttttattaataccaagttaatttcaaaagcatacaaaaacacactgctcctaaaagtatacaaaaacactcctcctacacagccccacccctctcatgctgttgtcacaaattacagctcagtatatttgtgtccatcaacatggattcataattattgttgtatacagttgtcttttaggacaaaacaatcacatacaaaaaaatacatgtatgctgtctcttatatttaattacacaatgaccttttctggggctctttatttcctcctgtgagttccagttactgtctagtgtcttttcatttcagcctgaaggacggtagggcgggtctacctttgtttatctgggaatgtcttaatctccccttcatttttgaagcagcttttgctagatgtagaatttttggtcaacagtatttttacttttgggaatttgtgccatcccactgcctgcccacctcacgacctctaatgagaaactggctgttcatctttctgtggatgcctcatacataacgagcggcttctctcctgctgatttcgacgttctctgtcttttggaagtttgctgatgaggtggtggatctctgagtttatcctactttgagttcattgagcttcttgaatgtgtaggttgtttttcattaaactgggaagttttctgccattattttttcaaatattgtttctgctcctttctcttctctccttctgggactcccattatgcatatgttggtccatttgacagtgtcccacccacaagtctctgaggctttatttttcttccctctctctctctctttcattttttgttttgagacagggtttctgtcacccaagatggagtgcagtggtgcaatctcagctcactgcagcctcctccttctgggctcaagcaatcctccggcctaccagcctcccaagtagctgggactacaggcacgcaccatcacatctggctaatttttgtatatttagtagagacgaggtttcacaatgttggccaggctggtctcaaactcctgacctcaagcgatccccctgccttggcctcccaaagtgctgggattacaggtgtgaagccactgcacccggcctcctttttctttctgttcctcagactaaataatctcaattggcctatctgcaaacaattcaaatctgctgttgagcacttctagtgcatgttttatttgttctacttttgttctacttttcaacttcagaatttctatttgattctcttttataatttttctctcttcaccagtattctctattatttgataagacatcatcgtcatacttttttttttttttttttagttttagtagaggcagggtttcaccatgttggcaaggcttgtctcgaactcctgacctcaggtgatccacccacctcagcttcccaaagtgctgggattacagacgtgagccactgtgcccggcccatacttcttttttttagacagtctcactgtgtcacccaggctagagtgcagtggcacaatctcagcttaccacagcctctgcctcttgggctcaagcagtcctcccacctcagcctcccaagtaggtgggactacaggcatacaccaccacgcttagctaattttgctaattttttggtagagacaaggtctccctatattgcccaggctgatctcagactcctgagctcaagcgatcctcctgcctcagcctcccaaagtgctgggactacaggtgtgagccacgcgcccgaccaacttgtgtatttctagtagagatggggtctcaccatgttggccaggctggtctcaaactcctgagctcaagcaatcctcctgcctcagcctcccaaactgctgggactacaggtgtgagccacgtgcctggccctcacactttctgttagtcctttcaaatgggatcttccaaggaactactagacataagaaaacaaataatgacaatttttttttataaatgaggtctattttgctatctccagttctggggatgcatgctgttggttttttgaggcaaccattgagctggggagcagaggatgaaaccagagcacgttaaaatacaacataattcacagttcttaccaagattcgagattttacgtatcccatttgctatccgtctcttctgctcaagggcagagatttcctgtgagttttcctcactctcgtatctccagtgcctgacacaggacaggagctgcacgagtttgttgagtgagtttctggctgtgaacctgtgaggctgagtgcacgaacgtgtgggcaggtgtggctgtacaggtgcgggttcagatgggagtgcaggtgagggatgtggctgtggctgttcagacctggggtgtgatcagggcctacgggccgcagccaggatgcctccctgcctccctgcagaagcggatgcagcagatcatggcccactgctttctggccgccaagcccaagctggactgcaagctgggttactttgacctcattggctgtgacttcctgattgatgacaacttcaaggtgctgtcctgggcggcggggggcacagtagacagatgcaaggaggcaggggccatctgtacaccctgaccacactggcaggccccaggcagaatctgcagtcagcccccaccctgcctgcatgcagccctggggatgggtgtatccatgaggctcaccccctgtgcagctaggatggaactgcaccccctcctcagagcagccccctcaggccagagcttcagaccctcagagcttcagtggacaaacaggggagcaaggctataggaaggaagcaatctcccagagccatctgtctgaatgaggaccagggcctctgcctcctgctggcccagtgggctcggggtgaggagggactgactggcgtctggggcaggtatggctgctggagatgaattctaacccagccctgcacaccaactgcgaggtcctgaaggaggtcatcccaggtgtggtcatcgagaccctgggtgagcctccaagcccccaccccacacccccacaacctgcccagtcttgaatgcctacctgccctcttcccaagttcagacccccacagatggggctcttccacctcccgagggcctgtgtggcagcgccgccccctgccccaaccttccccacacctcagctcacctgggtcccacccctcacaccctccccaccccctccagccccagcctctgccccccactcaccctctctcccccacccgcaccagacctggtgctcgagaccttccggaagagcctgcgcggccagaagatgttgcctctgctgtcccagcgccgcttcgtgctcctgcacaacggtgaggccgacccgcggccgcacctggggggctcgtgcagcctccgccgctggccgcccctgcccacccgccaggccaagtcctccgggccacccatgccgcatgccccagaccagccgggcgcccgcaggcctgcgccacctcccttggtgccgcagcgtccccggccacccggccccgacctggacagcgcccacgatggggagccccaggccccgggcacggagcagtcgggcacaggcaacaggcacccggcgcaagagccttccccggggacagccaaggaggaacgcgaggagcctgagaacgcgaggccctaggggcagccacccgcgcccagcgccccgcgccccgcgccccagccgtgctgcctgccctcagggacctataaagcccactttgctacaaacacagtctctgcagcagagtcctgccacctcagcgcccctgagcccatgcccaccggggtcacccccaccacaccagcactggcctgaaagatgctcccctgggacttccccaggcccccactagcccccagtccatggctgggccctgtccctggggagactgtgctgagggagggggtctccgcggctgggcccagtcctggggggctgttctgagggagggggttccccacggctggtctatactccctcccgggctgccccatcctgggctcccgcccaccaccctgtgcccctcagcacctgggccctcctgccgccctgtgaccccacggcccccatggcctggccggtgatccaccattgcctgtcatccccaggaagggtctgaacccctctggagctccaaaggaggagccccttgagcccaggattgctgccgtgggcacccacagagctcgccccagcctgcctggcacagaaccttcctgggcctttaagccccaagcctggcgctccagctccctgagcccccaaccttcctgcagtggccccaggacttagccaggggtgaggggcacagggcagctagccccaacaagagggtcccacagaagacatgctaagcccacactggccaggccctggtcagccctgtgtagccgctgatggttctgttccccatgggtctgggggtttgcgaggagagctctggcgtcccggggcctctgaggcgtccacactacccaccccctcactcatctcccacccagagagctaaagtgtatgggcctcttcccaatggctggctcaaggtgtctgtgccccccaagtcgagacctgaggatcggggggccccgcccccaggcccaccccccacatgccctgcctccgactccacacggtcacggccaagtcgccggtccctcctcctgccctgctccgcagccacgggggactgaggggccagcagaatctgctttggccacgtggccaccctgcgctccacagggacagcagctccattccctgggactcggcagccccggcactgctagaaggcaccgtcggctgtggtctctggccagcacagcaggtggggcacagccagggcgccaggaagaggagaaggcaggacagagggaactggggaccacagaggccaaaggaggccccaggtctcagagccagtgaggaaccaccccaggccaggggcagcccccaccaacatggtcctttcgctggggcctggagtgggggttcccaggtgaggggctgggaacacacctgtcattgtgatggggtccccagtcccctcccagcaggtctgttggaccctctgggggccaagggcagcagcggcctgttctgcagcccactgaggccagggaggggtgaagcaggaggggcctgggaggggtgaagcctccatggctggccaagcacccaggacttggttaatccacacctgctcttaggggtcagggccacactgc
